(19) United States
(12) Patent Application Publication
(10) Pub. No.: US 2025/0333485 A1
(43) Pub. Date: Oct. 30, 2025

(54) BROADLY NEUTRALIZING ANTI-SARS-COV-2 ANTIBODIES TARGETING THE N-TERMINAL DOMAIN OF THE SPIKE PROTEIN AND METHODS OF USE THEREOF

(71) Applicant: The Rockefeller University, New York, NY (US)

(72) Inventor: Michel C. Nussenzweig, New York, NY (US)

(21) Appl. No.: 18/833,645

(22) PCT Filed: Jan. 26, 2023
(86) PCT No.: PCT/US2023/061335

§ 371 Date: Jul. 26, 2024

Related U.S. Application Data
(60) Provisional application No. 63/303,887, filed on Jan. 27, 2022.

(51) Int. Cl. C07K 16/10; A61K 39/00; A61P 31/14

(52) U.S. Cl. CPC C07K 16/1003; A61P 31/14; A61K 2039/505; C07K 2317/34; C07K 2317/565; C07K 2317/76; C07K 2317/92

(57) ABSTRACT

This disclosure provides anti-SARS-COV-2 antibodies or antigen-binding fragments thereof targeting the N-terminal domain (NTD) of the spike(S) protein. The disclosed anti-SARS-COV-2 antibodies or antigen-binding fragments thereof have broadly neutralizing activities against several SARS-COV-2 variants of concern. The disclosed anti-SARS-COV-2 antibodies represent a therapeutic strategy in protecting from SARS-COV-2 infections.

### CROSS-REFERENCE TO RELATED APPLICATIONS

[0001] This application is a 371 of PCT/U.S. Pat. No. 2,361,335, filed on Jan. 26, 2026, which claims priority under 35 U.S.C. § 119 (e) to U.S. Provisional Patent Application No. 63/303,887, filed on Jan. 27, 2022. The foregoing applications are incorporated by reference herein in their entireties.

### REFERENCE TO AN ELECTRONIC SEQUENCE LISTING

[0002] This application contains a Sequence Listing, which has been submitted electronically in xml format and is hereby incorporated by reference in its entirety. Said xml copy, created on May 19, 2025, is named SeqList2-070413-20805.xml and is 6,294,589 bytes in size.

### FIELD OF THE INVENTION

[0003] The present invention relates to antibodies directed to epitopes of SARS-COV-2 Coronavirus 2 (“SARS-COV-2”). The present invention further relates to the preparation and use of neutralizing antibodies directed to the SARS-COV-2 spike(S)glycoproteins for the prevention and treatment of SARS-COV-2 infection.

### BACKGROUND

[0004] SARS-COV-2 is the virus that causes coronavirus disease 2019 (COVID-19). It contains four structural proteins, including spike(S), envelope (E), membrane (M), and nucleocapsid (N) proteins. Among them, S protein plays the most important role in viral attachment, fusion, and entry, and it serves as a target for development of antibodies, entry inhibitors, and vaccines.

[0005] The global emergence of SARS-COV-2 variants of concern, such as B.1.1.7 (20I, Alpha), B.1.351 (20H, Beta), P.1 (20J, Gamma), B.1.617.2 (21A, Delta), and B.1.1.529 (21K/Omicron), have been responsible for a series surges in reported COVID-19 cases. The Omicron variant, first identified as a variant of concern by the WHO in November 2021, is now dominating the United States, accounting for 73% of the COVID-19 cases as of Dec. 18, 2021. Several studies have indicated that the Alpha, Beta, Gamma, and Delta variants are more transmissible and possibly more virulent than previous SARS-COV-2 strains, and the CDC and others have indicated that the Omicron variant may spread twice as rapidly as Delta, but published data are unavailable at the time of this manuscript preparation. SARS-COV-2 variants of concern potentially confer resistance to therapeutics and decreased vaccine efficacy due to the presence of key mutations on the spike protein.

[0006] Thus, there is a pressing need for broadly neutralizing anti-SARS-COV-2 antibodies for treating or preventing SARS-COV-2 infection.

### SUMMARY

[0007] This disclosure addresses the need mentioned above in a number of aspects by providing broadly neutralizing anti-SARS-COV-2 antibodies or antigen-binding fragments thereof.

[0008] In one aspect, this disclosure provides an isolated anti-SARS-COV-2 antibody or antigen-binding fragment thereof that binds specifically to a SARS-COV-2 antigen. In some embodiments, the SARS-COV-2 antigen comprises a spike(S) polypeptide, such as a S polypeptide of a human or an animal SARS-COV-2.

[0009] In some embodiments, the SARS-COV-2 antigen comprises the N-terminal domain (NTD) (e.g., residues 14-305) of the S polypeptide. In some embodiments, the SARS-COV-2 antigen comprises the supersite b-hairpin (residues 152-158), the β8-strand (residue 97-102), N4-loop (residues 178-188), and/or N-linked glycans at positions N122 and N149 of the S polypeptide. In some embodiments, the SARS-COV-2 antigen comprises residues 27-32, 57-60, 210-218, and/or 286-303 of the S polypeptide. In some embodiments, the SARS-COV-2 antigen comprises residues 600-606 of the S polypeptide.

[0010] In some embodiments, the antibody or antigen-binding fragment thereof is capable of neutralizing a plurality of SARS-COV-2 strains.

[0011] In some embodiments, the antibody or antigen-binding fragment thereof comprises: (i) a heavy chain variable region having an amino acid sequence with at least 75% identity to one selected from those in Table 2 or 3; and/or (ii) a light chain variable region having an amino acid sequence with at least 75% identity to one selected from those in Table 2 or 3.

[0012] In some embodiments, the antibody or antigen-binding fragment thereof comprises: (i) a heavy chain variable region having an amino acid sequence selected from those in Table 2 or 3; and/or (ii) a light chain variable region having an amino acid sequence selected from those in Table 2 or 3.

[0013] In some embodiments, the antibody or antigen-binding fragment thereof comprises a heavy chain variable region and a light chain variable region that comprise the amino acid sequence pair selected from those in Table 2 or 3.

[0014] In some embodiments, the antibody or antigen-binding fragment thereof comprises three heavy chain complementarity determining regions (HCDRs) (HCDR1, HCDR2, and HCDR3) of a heavy chain variable region having the amino acid sequence of SEQ ID NO: 1, 3, 5, 7, 9, 11, 13, 15, 17, 19, 21, 23, 25, 27, 29, 31, 33, 35, 37, 39, 41, 43, 45, 47, 49, 51, 53, 55, 57, 59, 61, 63, 65, 67, 69, 71, 73, 75, 77, 79, 81, 83, 85, 87, 89, 91, 93, 95, 97, 99, 101, 103, 105, 107, 109, 111, 113, 115, 117, 119, 121, 123, 125, 127, 129, 131, 133, 135, 137, 139, 141, 143, 145, 147, 149, 151, 153, 155, 157, 159, 161, 163, 165, 167, 169, 171, 173, 175, 177, 179, 181, 183, 185, 187, 189, 191, 193, 195, 197, 199, 201, 203, 205, 207, 209, 211, 213, 215, 217, 219, 221, 223, 225, 227, 229, 231, 233, 235, 237, 239, 241, 243, 245, 247, 249, 251, 253, 255, 257, 259, 261, 263, 265, 267, 269, 271, 273, 275, 277, 279, 281, 283, 285, 287, 289, 291, 293, 295, 297, 299, 301, 303, 305, 307, 309, 311, 313, 315, 317, 319, 321, 323, 325, 327, 329, 331, 333, 335, 337, 339, 341, 343, 345, 347, 349, 351, 353, 355, 357, 359, 361, 363, 365, 367, 369, 371, 373, 375, 377, 379, 381, 383, 385, 387, 389, 391, 393, 395, 397, 399, 401, 403, 405, 407, 409, 411, 413, 415, 417, 419, 421, 423, 425, 427, 429, 431, 433, 435, 437, 439, 441, 443, 445, 447, 449, 451, 453, 455, 457, 459, 461, 463, 465, 467, 469, 471, 473, 475, 477, 479, 481, 483, 485, 487, 489, 491, 493, 495, 497, 499, 501, 503, 505, 507, 509, 511, 513, 515, 517, 519, 521, 523, 525, 527, 529, 531, 533, 535, 537, 539, 541, 543, 545, 547, or 549; and three light chain CDRs (LCDR1, LCDR2, and LCDR3) of a light chain variable region having the amino acid sequence of SEQ ID NO: 2, 4, 6, 8, 10, 12, 14, 16, 18, 20, 22, 24, 26, 28, 30, 32, 34, 36, 38, 40, 42, 44, 46, 48, 50, 52, 54, 56, 58, 60, 62, 64, 66, 68, 70, 72, 74, 76, 78, 80, 82, 84, 86, 88, 90, 92, 94, 96, 98, 100, 102, 104, 106, 108, 110, 112, 114, 116, 118, 120, 122, 124, 126, 128, 130, 132, 134, 136, 138, 140, 142, 144, 146, 148, 150, 152, 154, 156, 158, 160, 162, 164, 166, 168, 170, 172, 174, 176, 178, 180, 182, 184, 186, 188, 190, 192, 194, 196, 198, 200, 202, 204, 206, 208, 210, 212, 214, 216, 218, 220, 222, 224, 226, 228, 230, 232, 234, 236, 238, 240, 242, 244, 246, 248, 250, 252, 254, 256, 258, 260, 262, 264, 266, 268, 270, 272, 274, 276, 278, 280, 282, 284, 286, 288, 290, 292, 294, 296, 298, 300, 302, 304, 306, 308, 310, 312, 314, 316, 318, 320, 322, 324, 326, 328, 330, 332, 334, 336, 338, 340, 342, 344, 346, 348, 350, 352, 354, 356, 358, 360, 362, 364, 366, 368, 370, 372, 374, 376, 378, 380, 382, 384, 386, 388, 390, 392, 394, 396, 398, 400, 402, 404, 406, 408, 410, 412, 414, 416, 418, 420, 422, 424, 426, 428, 430, 432, 434, 436, 438, 440, 442, 444, 446, 448, 450, 452, 454, 456, 458, 460, 462, 464, 466, 468, 470, 472, 474, 476, 478, 480, 482, 484, 486, 488, 490, 492, 494, 496, 498, 500, 502, 504, 506, 508, 510, 512, 514, 516, 518, 520, 522, 524, 526, 528, 530, 532, 534, 536, 538, 540, 542, 544, 546, 548, or 550.

[0015] In some embodiments, the antibody or antigen-binding fragment thereof comprises: a heavy chain variable region comprising an amino acid sequence with at least 75% identity to the amino acid sequence of SEQ ID NO: 1, 3, 5, 7, 9, 11, 13, 15, 17, 19, 21, 23, 25, 27, 29, 31, 33, 35, 37, 39, 41, 43, 45, 47, 49, 51, 53, 55, 57, 59, 61, 63, 65, 67, 69, 71, 73, 75, 77, 79, 81, 83, 85, 87, 89, 91, 93, 95, 97, 99, 101, 103, 105, 107, 109, 111, 113, 115, 117, 119, 121, 123, 125, 127, 129, 131, 133, 135, 137, 139, 141, 143, 145, 147, 149, 151, 153, 155, 157, 159, 161, 163, 165, 167, 169, 171, 173, 175, 177, 179, 181, 183, 185, 187, 189, 191, 193, 195, 197, 199, 201, 203, 205, 207, 209, 211, 213, 215, 217, 219, 221, 223, 225, 227, 229, 231, 233, 235, 237, 239, 241, 243, 245, 247, 249, 251, 253, 255, 257, 259, 261, 263, 265, 267, 269, 271, 273, 275, 277, 279, 281, 283, 285, 287, 289, 291, 293, 295, 297, 299, 301, 303, 305, 307, 309, 311, 313, 315, 317, 319, 321, 323, 325, 327, 329, 331, 333, 335, 337, 339, 341, 343, 345, 347, 349, 351, 353, 355, 357, 359, 361, 363, 365, 367, 369, 371, 373, 375, 377, 379, 381, 383, 385, 387, 389, 391, 393, 395, 397, 399, 401, 403, 405, 407, 409, 411, 413, 415, 417, 419, 421, 423, 425, 427, 429, 431, 433, 435, 437, 439, 441, 443, 445, 447, 449, 451, 453, 455, 457, 459, 461, 463, 465, 467, 469, 471, 473, 475, 477, 479, 481, 483, 485, 487, 489, 491, 493, 495, 497, 499, 501, 503, 505, 507, 509, 511, 513, 515, 517, 519, 521, 523, 525, 527, 529, 531, 533, 535, 537, 539, 541, 543, 545, 547, or 549; or comprising the amino acid sequence of SEQ ID NO: 1, 3, 5, 7, 9, 11, 13, 15, 17, 19, 21, 23, 25, 27, 29, 31, 33, 35, 37, 39, 41, 43, 45, 47, 49, 51, 53, 55, 57, 59, 61, 63, 65, 67, 69, 71, 73, 75, 77, 79, 81, 83, 85, 87, 89, 91, 93, 95, 97, 99, 101, 103, 105, 107, 109, 111, 113, 115, 117, 119, 121, 123, 125, 127, 129, 131, 133, 135, 137, 139, 141, 143, 145, 147, 149, 151, 153, 155, 157, 159, 161, 163, 165, 167, 169, 171, 173, 175, 177, 179, 181, 183, 185, 187, 189, 191, 193, 195, 197, 199, 201, 203, 205, 207, 209, 211, 213, 215, 217, 219, 221, 223, 225, 227, 229, 231, 233, 235, 237, 239, 241, 243, 245, 247, 249, 251, 253, 255, 257, 259, 261, 263, 265, 267, 269, 271, 273, 275, 277, 279, 281, 283, 285, 287, 289, 291, 293, 295, 297, 299, 301, 303, 305, 307, 309, 311, 313, 315, 317, 319, 321, 323, 325, 327, 329, 331, 333, 335, 337, 339, 341, 343, 345, 347, 349, 351, 353, 355, 357, 359, 361, 363, 365, 367, 369, 371, 373, 375, 377, 379, 381, 383, 385, 387, 389, 391, 393, 395, 397, 399, 401, 403, 405, 407, 409, 411, 413, 415, 417, 419, 421, 423, 425, 427, 429, 431, 433, 435, 437, 439, 441, 443, 445, 447, 449, 451, 453, 455, 457, 459, 461, 463, 465, 467, 469, 471, 473, 475, 477, 479, 481, 483, 485, 487, 489, 491, 493, 495, 497, 499, 501, 503, 505, 507, 509, 511, 513, 515, 517, 519, 521, 523, 525, 527, 529, 531, 533, 535, 537, 539, 541, 543, 545, 547, or 549; and/or a light chain variable region comprising an amino acid sequence with at least 75% identity to the amino acid sequence of SEQ ID NO: 2, 4, 6, 8, 10, 12, 14, 16, 18, 20, 22, 24, 26, 28, 30, 32, 34, 36, 38, 40, 42, 44, 46, 48, 50, 52, 54, 56, 58, 60, 62, 64, 66, 68, 70, 72, 74, 76, 78, 80, 82, 84, 86, 88, 90, 92, 94, 96, 98, 100, 102, 104, 106, 108, 110, 112, 114, 116, 118, 120, 122, 124, 126, 128, 130, 132, 134, 136, 138, 140, 142, 144, 146, 148, 150, 152, 154, 156, 158, 160, 162, 164, 166, 168, 170, 172, 174, 176, 178, 180, 182, 184, 186, 188, 190, 192, 194, 196, 198, 200, 202, 204, 206, 208, 210, 212, 214, 216, 218, 220, 222, 224, 226, 228, 230, 232, 234, 236, 238, 240, 242, 244, 246, 248, 250, 252, 254, 256, 258, 260, 262, 264, 266, 268, 270, 272, 274, 276, 278, 280, 282, 284, 286, 288, 290, 292, 294, 296, 298, 300, 302, 304, 306, 308, 310, 312, 314, 316, 318, 320, 322, 324, 326, 328, 330, 332, 334, 336, 338, 340, 342, 344, 346, 348, 350, 352, 354, 356, 358, 360, 362, 364, 366, 368, 370, 372, 374, 376, 378, 380, 382, 384, 386, 388, 390, 392, 394, 396, 398, 400, 402, 404, 406, 408, 410, 412, 414, 416, 418, 420, 422, 424, 426, 428, 430, 432, 434, 436, 438, 440, 442, 444, 446, 448, 450, 452, 454, 456, 458, 460, 462, 464, 466, 468, 470, 472, 474, 476, 478, 480, 482, 484, 486, 488, 490, 492, 494, 496, 498, 500, 502, 504, 506, 508, 510, 512, 514, 516, 518, 520, 522, 524, 526, 528, 530, 532, 534, 536, 538, 540, 542, 544, 546, 548, or 550; or comprising the amino acid sequence of SEQ ID NO: 2, 4, 6, 8, 10, 12, 14, 16, 18, 20, 22, 24, 26, 28, 30, 32, 34, 36, 38, 40, 42, 44, 46, 48, 50, 52, 54, 56, 58, 60, 62, 64, 66, 68, 70, 72, 74, 76, 78, 80, 82, 84, 86, 88, 90, 92, 94, 96, 98, 100, 102, 104, 106, 108, 110, 112, 114, 116, 118, 120, 122, 124, 126, 128, 130, 132, 134, 136, 138, 140, 142, 144, 146, 148, 150, 152, 154, 156, 158, 160, 162, 164, 166, 168, 170, 172, 174, 176, 178, 180, 182, 184, 186, 188, 190, 192, 194, 196, 198, 200, 202, 204, 206, 208, 210, 212, 214, 216, 218, 220, 222, 224, 226, 228, 230, 232, 234, 236, 238, 240, 242, 244, 246, 248, 250, 252, 254, 256, 258, 260, 262, 264, 266, 268, 270, 272, 274, 276, 278, 280, 282, 284, 286, 288, 290, 292, 294, 296, 298, 300, 302, 304, 306, 308, 310, 312, 314, 316, 318, 320, 322, 324, 326, 328, 330, 332, 334, 336, 338, 340, 342, 344, 346, 348, 350, 352, 354, 356, 358, 360, 362, 364, 366, 368, 370, 372, 374, 376, 378, 380, 382, 384, 386, 388, 390, 392, 394, 396, 398, 400, 402, 404, 406, 408, 410, 412, 414, 416, 418, 420, 422, 424, 426, 428, 430, 432, 434, 436, 438, 440, 442, 444, 446, 448, 450, 452, 454, 456, 458, 460, 462, 464, 466, 468, 470, 472, 474, 476, 478, 480, 482, 484, 486, 488, 490, 492, 494, 496, 498, 500, 502, 504, 506, 508, 510, 512, 514, 516, 518, 520, 522, 524, 526, 528, 530, 532, 534, 536, 538, 540, 542, 544, 546, 548, or 550.

[0016] In some embodiments, the antibody or antigen-binding fragment thereof comprises a heavy chain variable region (HCVR) and a light chain variable region (LCVR) that comprise a HCVR/LCVR amino acid sequence pair of SEQ ID NOs: 1-2, 3-4, 5-6, 7-8, 9-10, 11-12, 13-14, 15-16, 17-18, 19-20, 21-22, 23-24, 25-26, 27-28, 29-30, 31-32, 33-34, 35-36, 37-38, 39-40, 41-42, 43-44, 45-46, 47-48, 49-50, 51-52, 53-54, 55-56, 57-58, 59-60, 61-62, 63-64, 65-66, 67-68, 69-70, 71-72, 73-74, 75-76, 77-78, 79-80, 81-82, 83-84, 85-86, 87-88, 89-90, 91-92, 93-94, 95-96, 97-98, 99-100, 101-102, 103-104, 105-106, 107-108, 109-110, 111-112, 113-114, 115-116, 117-118, 119-120, 121-122, 123-124, 125-126, 127-128, 129-130, 131-132, 133-134, 135-136, 137-138, 139-140, 141-142, 143-144, 145-146, 147-148, 149-150, 151-152, 153-154, 155-156, 157-158, 159-160, 161-162, 163-164, 165-166, 167-168, 169-170, 171-172, 173-174, 175-176, 177-178, 179-180, 181-182, 183-184, 185-186, 187-188, 189-190, 191-192, 193-194, 195-196, 197-198, 199-200, 201-202, 203-204, 205-206, 207-208, 209-210, 211-212, 213-214, 215-216, 217-218, 219-220, 221-222, 223-224, 225-226, 227-228, 229-230, 231-232, 233-234, 235-236, 237-238, 239-240, 241-242, 243-244, 245-246, 247-248, 249-250, 251-252, 253-254, 255-256, 257-258, 259-260, 261-262, 263-264, 265-266, 267-268, 269-270, 271-272, 273-274, 275-276, 277-278, 279-280, 281-282, 283-284, 285-286, 287-288, 289-290, 291-292, 293-294, 295-296, 297-298, 299-300, 301-302, 303-304, 305-306, 307-308, 309-310, 311-312, 313-314, 315-316, 317-318, 319-320, 321-322, 323-324, 325-326, 327-328, 329-330, 331-332, 333-334, 335-336, 337-338, 339-340, 341-342, 343-344, 345-346, 347-348, 349-350, 351-352, 353-354, 355-356, 357-358, 359-360, 361-362, 363-364, 365-366, 367-368, 369-370, 371-372, 373-374, 375-376, 377-378, 379-380, 381-382, 383-384, 385-386, 387-388, 389-390, 391-392, 393-394, 395-396, 397-398, 399-400, 401-402, 403-404, 405-406, 407-408, 409-410, 411-412, 413-414, 415-416, 417-418, 419-420, 421-422, 423-424, 425-426, 427-428, 429-430, 431-432, 433-434, 435-436, 437-438, 439-440, 441-442, 443-444, 445-446, 447-448, 449-450, 451-452, 453-454, 455-456, 457-458, 459-460, 461-462, 463-464, 465-466, 467-468, 469-470, 471-472, 473-474, 475-476, 477-478, 479-480, 481-482, 483-484, 485-486, 487-488, 489-490, 491-492, 493-494, 495-496, 497-498, 499-500, 501-502, 503-504, 505-506, 507-508, 509-510, 511-512, 513-514, 515-516, 517-518, 519-520, 521-522, 523-524, 525-526, 527-528, 529-530, 531-532, 533-534, 535-536, 537-538, 539-540, 541-542, 543-544, 545-546, 547-548, or 549-550.

[0017] In some embodiments, the antibody or antigen-binding fragment thereof comprises a heavy chain variable region (HCVR) and a light chain variable region (LCVR) that comprise a HCVR/LCVR amino acid sequence pair of SEQ ID NOs: 21-22, 29-30, 31-32, 41-42, 43-44, 45-46, 49-50, 55-56, 59-60, 61-62, 79-80, 91-92, 101-102, 111-112, 115-116, 151-152, 161-162, 163-164, 165-166, 167-168, 177-178, 179-180, 183-184, 185-186, 197-198, 201-202, 203-204, 207-208, 209-210, 211-212, 213-214, 215-216, 219-220, 221-222, 239-240, 243-244, 261-262, 267-268, 273-274, 293-294, 297-298, 307-308, 323-324, 347-348, 371-372, 387-388, 389-390, 397-398, 419-420, 421-422, 433-434, 435-436, 439-440, 453-454, 459-460, 461-462, 471-472, 491-492, 493-494, 501-502, 503-504, 523-524, or 533-534.

[0018] In some embodiments, the heavy chain variable region (HCVR) and the light chain variable region (LCVR) comprise a HCVR/LCVR amino acid sequence pair of SEQ ID NOs: 31-32, 111-112, 167-168, 211-212, 389-390, or 533-534.

[0019] In some embodiments, the antibody or antigen-binding fragment thereof is a multivalent antibody that comprises (a) a first target binding site that specifically binds to an epitope within the S polypeptide, and (b) a second target binding site that binds to a different epitope on the S polypeptide or a different molecule. In some embodiments, the multivalent antibody is a bivalent or bispecific antibody.

[0020] In some embodiments, the antibody or the antigen-binding fragment thereof further comprises a variant Fc constant region. In some embodiments, the antibody is a monoclonal antibody. In some embodiments, the antibody is a chimeric antibody, a humanized antibody, or a humanized monoclonal antibody. In some embodiments, the antibody is a single-chain antibody, Fab or Fab2 fragment.

[0021] In some embodiments, the antibody or antigen-binding fragment thereof is detectably labeled or conjugated to a toxin, a therapeutic agent, a polymer, a receptor, an enzyme, or a receptor ligand. In some embodiments, the polymer is polyethylene glycol (PEG).

[0022] For example, an antibody of the invention may be coupled to a toxin. Such antibodies may be used to treat animals, including humans, that are infected with the virus that is etiologically linked to SARS-COV-2. For example, an antibody that binds to the spike protein of the coronavirus that is etiologically linked to SARS-COV-2 may be coupled to a tetanus toxin and administered to an animal suffering from infection by the aforementioned virus. The toxin-coupled antibody is thought to bind to a portion of a spike protein presented on an infected cell, and then kill the infected cell.

[0023] An antibody of the invention may be coupled to a detectable tag (or detectable label). Such antibodies may be used within diagnostic assays to determine if an animal, such as a human, is infected with SARS-COV-2. Examples of detectable tags include fluorescent proteins (i.e., green fluorescent protein, red fluorescent protein, yellow fluorescent protein), fluorescent markers (i.e., fluorescein isothiocyanate, rhodamine, texas red), radiolabels (i.e., 3H, 32P, 125I), enzymes (i.e., β-galactosidase, horseradish peroxidase, β-glucuronidase, alkaline phosphatase), or an affinity tag (i.e., avidin, biotin, streptavidin).

[0024] In another aspect, this disclosure provides a pharmaceutical composition comprising the antibody or antigen-binding fragment thereof as described herein and optionally a pharmaceutically acceptable carrier or excipient.

[0025] In some embodiments, the pharmaceutical comprises two or more of the antibody or antigen-binding fragment thereof described herein, such as any combinations of the antibody or antigen-binding fragment thereof comprising a heavy chain and a light chain that comprise the respective amino acid sequences of one selected from those in Table 2 or 3.

[0026] In some embodiments, the two or more of the antibody or antigen-binding fragment thereof comprise a first antibody or antigen-binding fragment thereof comprising a heavy chain variable region and a light chain variable region comprising the respective amino acid sequences of a first antibody selected from those in Table 2 or 3; and a second antibody or antigen-binding fragment thereof comprising a heavy chain variable region and a light chain variable region comprising the respective amino acid sequences of a second antibody selected from those in Table 2 or 3, wherein the first antibody or antigen-binding fragment thereof is different from the second antibody or antigen-binding fragment thereof.

[0027] In some embodiments, the two or more of the antibody or antigen-binding fragment thereof comprise: a first antibody or antigen-binding fragment thereof comprising a HCVR/LCVR amino acid sequence pair of SEQ ID NOs: 1-2, 3-4, 5-6, 7-8, 9-10, 11-12, 13-14, 15-16, 17-18, 19-20, 21-22, 23-24, 25-26, 27-28, 29-30, 31-32, 33-34, 35-36, 37-38, 39-40, 41-42, 43-44, 45-46, 47-48, 49-50, 51-52, 53-54, 55-56, 57-58, 59-60, 61-62, 63-64, 65-66, 67-68, 69-70, 71-72, 73-74, 75-76, 77-78, 79-80, 81-82, 83-84, 85-86, 87-88, 89-90, 91-92, 93-94, 95-96, 97-98, 99-100, 101-102, 103-104, 105-106, 107-108, 109-110, 111-112, 113-114, 115-116, 117-118, 119-120, 121-122, 123-124, 125-126, 127-128, 129-130, 131-132, 133-134, 135-136, 137-138, 139-140, 141-142, 143-144, 145-146, 147-148, 149-150, 151-152, 153-154, 155-156, 157-158, 159-160, 161-162, 163-164, 165-166, 167-168, 169-170, 171-172, 173-174, 175-176, 177-178, 179-180, 181-182, 183-184, 185-186, 187-188, 189-190, 191-192, 193-194, 195-196, 197-198, 199-200, 201-202, 203-204, 205-206, 207-208, 209-210, 211-212, 213-214, 215-216, 217-218, 219-220, 221-222, 223-224, 225-226, 227-228, 229-230, 231-232, 233-234, 235-236, 237-238, 239-240, 241-242, 243-244, 245-246, 247-248, 249-250, 251-252, 253-254, 255-256, 257-258, 259-260, 261-262, 263-264, 265-266, 267-268, 269-270, 271-272, 273-274, 275-276, 277-278, 279-280, 281-282, 283-284, 285-286, 287-288, 289-290, 291-292, 293-294, 295-296, 297-298, 299-300, 301-302, 303-304, 305-306, 307-308, 309-310, 311-312, 313-314, 315-316, 317-318, 319-320, 321-322, 323-324, 325-326, 327-328, 329-330, 331-332, 333-334, 335-336, 337-338, 339-340, 341-342, 343-344, 345-346, 347-348, 349-350, 351-352, 353-354, 355-356, 357-358, 359-360, 361-362, 363-364, 365-366, 367-368, 369-370, 371-372, 373-374, 375-376, 377-378, 379-380, 381-382, 383-384, 385-386, 387-388, 389-390, 391-392, 393-394, 395-396, 397-398, 399-400, 401-402, 403-404, 405-406, 407-408, 409-410, 411-412, 413-414, 415-416, 417-418, 419-420, 421-422, 423-424, 425-426, 427-428, 429-430, 431-432, 433-434, 435-436, 437-438, 439-440, 441-442, 443-444, 445-446, 447-448, 449-450, 451-452, 453-454, 455-456, 457-458, 459-460, 461-462, 463-464, 465-466, 467-468, 469-470, 471-472, 473-474, 475-476, 477-478, 479-480, 481-482, 483-484, 485-486, 487-488, 489-490, 491-492, 493-494, 495-496, 497-498, 499-500, 501-502, 503-504, 505-506, 507-508, 509-510, 511-512, 513-514, 515-516, 517-518, 519-520, 521-522, 523-524, 525-526, 527-528, 529-530, 531-532, 533-534, 535-536, 537-538, 539-540, 541-542, 543-544, 545-546, 547-548, or 549-550; and a second antibody or antigen-binding fragment thereof comprising a HCVR/LCVR amino acid sequence pair of SEQ ID NOs: 1-2, 3-4, 5-6, 7-8, 9-10, 11-12, 13-14, 15-16, 17-18, 19-20, 21-22, 23-24, 25-26, 27-28, 29-30, 31-32, 33-34, 35-36, 37-38, 39-40, 41-42, 43-44, 45-46, 47-48, 49-50, 51-52, 53-54, 55-56, 57-58, 59-60, 61-62, 63-64, 65-66, 67-68, 69-70, 71-72, 73-74, 75-76, 77-78, 79-80, 81-82, 83-84, 85-86, 87-88, 89-90, 91-92, 93-94, 95-96, 97-98, 99-100, 101-102, 103-104, 105-106, 107-108, 109-110, 111-112, 113-114, 115-116, 117-118, 119-120, 121-122, 123-124, 125-126, 127-128, 129-130, 131-132, 133-134, 135-136, 137-138, 139-140, 141-142, 143-144, 145-146, 147-148, 149-150, 151-152, 153-154, 155-156, 157-158, 159-160, 161-162, 163-164, 165-166, 167-168, 169-170, 171-172, 173-174, 175-176, 177-178, 179-180, 181-182, 183-184, 185-186, 187-188, 189-190, 191-192, 193-194, 195-196, 197-198, 199-200, 201-202, 203-204, 205-206, 207-208, 209-210, 211-212, 213-214, 215-216, 217-218, 219-220, 221-222, 223-224, 225-226, 227-228, 229-230, 231-232, 233-234, 235-236, 237-238, 239-240, 241-242, 243-244, 245-246, 247-248, 249-250, 251-252, 253-254, 255-256, 257-258, 259-260, 261-262, 263-264, 265-266, 267-268, 269-270, 271-272, 273-274, 275-276, 277-278, 279-280, 281-282, 283-284, 285-286, 287-288, 289-290, 291-292, 293-294, 295-296, 297-298, 299-300, 301-302, 303-304, 305-306, 307-308, 309-310, 311-312, 313-314, 315-316, 317-318, 319-320, 321-322, 323-324, 325-326, 327-328, 329-330, 331-332, 333-334, 335-336, 337-338, 339-340, 341-342, 343-344, 345-346, 347-348, 349-350, 351-352, 353-354, 355-356, 357-358, 359-360, 361-362, 363-364, 365-366, 367-368, 369-370, 371-372, 373-374, 375-376, 377-378, 379-380, 381-382, 383-384, 385-386, 387-388, 389-390, 391-392, 393-394, 395-396, 397-398, 399-400, 401-402, 403-404, 405-406, 407-408, 409-410, 411-412, 413-414, 415-416, 417-418, 419-420, 421-422, 423-424, 425-426, 427-428, 429-430, 431-432, 433-434, 435-436, 437-438, 439-440, 441-442, 443-444, 445-446, 447-448, 449-450, 451-452, 453-454, 455-456, 457-458, 459-460, 461-462, 463-464, 465-466, 467-468, 469-470, 471-472, 473-474, 475-476, 477-478, 479-480, 481-482, 483-484, 485-486, 487-488, 489-490, 491-492, 493-494, 495-496, 497-498, 499-500, 501-502, 503-504, 505-506, 507-508, 509-510, 511-512, 513-514, 515-516, 517-518, 519-520, 521-522, 523-524, 525-526, 527-528, 529-530, 531-532, 533-534, 535-536, 537-538, 539-540, 541-542, 543-544, 545-546, 547-548, or 549-550; wherein the first antibody or antigen-binding fragment thereof is different from the second antibody or antigen-binding fragment thereof.

[0028] In some embodiments, the pharmaceutical composition further comprises a second therapeutic agent. In some embodiments, the second therapeutic agent comprises an anti-inflammatory drug or an antiviral compound. In some embodiments, the antiviral compound comprises: a nucleoside analog, a peptoid, an oligopeptide, a polypeptide, a protease inhibitor, a 3C-like protease inhibitor, a papain-like protease inhibitor, or an inhibitor of an RNA dependent RNA polymerase. In some embodiments, the antiviral compound may include: acyclovir, gancyclovir, vidarabine, foscarnet, cidofovir, amantadine, ribavirin, trifluorothymidine, zidovudine, didanosine, zalcitabine, or an interferon. In some embodiments, the interferon is an interferon-a or an interferon-β.

[0029] Also within the scope of this disclosure is use of the pharmaceutical composition, as described herein, in the preparation of a medicament for the diagnosis, prophylaxis, treatment, or combination thereof of a condition resulting from a SARS-COV-2.

[0030] In another aspect, this disclosure also provides (i) a nucleic acid molecule encoding a polypeptide chain of the antibody or antigen-binding fragment thereof described herein; (ii) a vector comprising the nucleic acid molecule as described; and (iii) a cultured host cell comprising the vector as described.

[0031] Also provided is a method for producing a polypeptide, comprising: (a) obtaining the cultured host cell as described; (b) culturing the cultured host cell in a medium under conditions permitting expression of a polypeptide encoded by the vector and assembling of an antibody or fragment thereof; and (c) purifying the antibody or fragment from the cultured cell or the medium of the cell.

[0032] In another aspect, this disclosure provides a kit comprising a pharmaceutically acceptable dose unit of the antibody or antigen-binding fragment thereof or the pharmaceutical composition described herein. Also within the scope of this disclosure is a kit for the diagnosis, prognosis, or monitoring of the treatment of SARS-COV-2 in a subject, comprising: one or more of the antibody or antigen-binding fragment thereof as described herein; and a least one detection reagent that binds specifically to the antibody or antigen-binding fragment thereof.

[0033] In yet another aspect, this disclosure further provides a method of neutralizing SARS-COV-2 in a subject. The method comprises administering to a subject in need thereof a therapeutically effective amount of the antibody or antigen-binding fragment thereof or a therapeutically effective amount of the pharmaceutical composition, as described herein.

[0034] In yet another aspect, this disclosure additionally provides a method of preventing or treating a SARS-COV-2 infection. The method comprises administering to a subject in need thereof a therapeutically effective amount of the antibody or antigen-binding fragment thereof or a therapeutically effective amount of the pharmaceutical composition, as described herein.

[0035] In some embodiments, the method of neutralizing SARS-COV-2 in a subject comprises administering to a subject in need thereof a therapeutically effective amount of a first antibody or antigen-binding fragment thereof and a second antibody or antigen-binding fragment thereof of the antibody or antigen-binding fragment, as described herein, wherein the first antibody or antigen-binding fragment thereof and the second antibody or antigen binding fragment thereof exhibit synergistic activity or a therapeutically effective amount of the pharmaceutical composition described herein.

[0036] In some embodiments, the method of preventing or treating a SARS-COV-2 infection, comprising administering to a subject in need thereof a therapeutically effective amount of a first antibody or antigen-binding fragment thereof and a second antibody or antigen-binding fragment thereof of the antibody or antigen-binding fragment, as described herein, wherein the first antibody or antigen-binding fragment thereof and the second antibody or antigen binding fragment thereof exhibit synergistic activity or a therapeutically effective amount of the pharmaceutical composition described herein. In some embodiments, the first antibody or antigen-binding fragment thereof is administered before, after, or concurrently with the second antibody or antigen-binding fragment thereof.

[0037] In some embodiments, the first antibody or antigen-binding fragment thereof and the second antibody or antigen-binding fragment thereof can be any combinations of the antibody or antigen-binding fragment thereof comprising a heavy chain and a light chain that comprise the respective amino acid sequences of an antibody selected from those in Table 2 or 3.

[0038] In some embodiments, the first antibody or antigen-binding fragment thereof comprises a heavy chain variable region and a light chain variable region comprising a HCVR/LCVR amino acid sequence pair of SEQ ID NOs: 1-2, 3-4, 5-6, 7-8, 9-10, 11-12, 13-14, 15-16, 17-18, 19-20, 21-22, 23-24, 25-26, 27-28, 29-30, 31-32, 33-34, 35-36, 37-38, 39-40, 41-42, 43-44, 45-46, 47-48, 49-50, 51-52, 53-54, 55-56, 57-58, 59-60, 61-62, 63-64, 65-66, 67-68, 69-70, 71-72, 73-74, 75-76, 77-78, 79-80, 81-82, 83-84, 85-86, 87-88, 89-90, 91-92, 93-94, 95-96, 97-98, 99-100, 101-102, 103-104, 105-106, 107-108, 109-110, 111-112, 113-114, 115-116, 117-118, 119-120, 121-122, 123-124, 125-126, 127-128, 129-130, 131-132, 133-134, 135-136, 137-138, 139-140, 141-142, 143-144, 145-146, 147-148, 149-150, 151-152, 153-154, 155-156, 157-158, 159-160, 161-162, 163-164, 165-166, 167-168, 169-170, 171-172, 173-174, 175-176, 177-178, 179-180, 181-182, 183-184, 185-186, 187-188, 189-190, 191-192, 193-194, 195-196, 197-198, 199-200, 201-202, 203-204, 205-206, 207-208, 209-210, 211-212, 213-214, 215-216, 217-218, 219-220, 221-222, 223-224, 225-226, 227-228, 229-230, 231-232, 233-234, 235-236, 237-238, 239-240, 241-242, 243-244, 245-246, 247-248, 249-250, 251-252, 253-254, 255-256, 257-258, 259-260, 261-262, 263-264, 265-266, 267-268, 269-270, 271-272, 273-274, 275-276, 277-278, 279-280, 281-282, 283-284, 285-286, 287-288, 289-290, 291-292, 293-294, 295-296, 297-298, 299-300, 301-302, 303-304, 305-306, 307-308, 309-310, 311-312, 313-314, 315-316, 317-318, 319-320, 321-322, 323-324, 325-326, 327-328, 329-330, 331-332, 333-334, 335-336, 337-338, 339-340, 341-342, 343-344, 345-346, 347-348, 349-350, 351-352, 353-354, 355-356, 357-358, 359-360, 361-362, 363-364, 365-366, 367-368, 369-370, 371-372, 373-374, 375-376, 377-378, 379-380, 381-382, 383-384, 385-386, 387-388, 389-390, 391-392, 393-394, 395-396, 397-398, 399-400, 401-402, 403-404, 405-406, 407-408, 409-410, 411-412, 413-414, 415-416, 417-418, 419-420, 421-422, 423-424, 425-426, 427-428, 429-430, 431-432, 433-434, 435-436, 437-438, 439-440, 441-442, 443-444, 445-446, 447-448, 449-450, 451-452, 453-454, 455-456, 457-458, 459-460, 461-462, 463-464, 465-466, 467-468, 469-470, 471-472, 473-474, 475-476, 477-478, 479-480, 481-482, 483-484, 485-486, 487-488, 489-490, 491-492, 493-494, 495-496, 497-498, 499-500, 501-502, 503-504, 505-506, 507-508, 509-510, 511-512, 513-514, 515-516, 517-518, 519-520, 521-522, 523-524, 525-526, 527-528, 529-530, 531-532, 533-534, 535-536, 537-538, 539-540, 541-542, 543-544, 545-546, 547-548, or 549-550; and the second antibody or antigen-binding fragment thereof comprising a HCVR/LCVR amino acid sequence pair of SEQ ID NOs: 1-2, 3-4, 5-6, 7-8, 9-10, 11-12, 13-14, 15-16, 17-18, 19-20, 21-22, 23-24, 25-26, 27-28, 29-30, 31-32, 33-34, 35-36, 37-38, 39-40, 41-42, 43-44, 45-46, 47-48, 49-50, 51-52, 53-54, 55-56, 57-58, 59-60, 61-62, 63-64, 65-66, 67-68, 69-70, 71-72, 73-74, 75-76, 77-78, 79-80, 81-82, 83-84, 85-86, 87-88, 89-90, 91-92, 93-94, 95-96, 97-98, 99-100, 101-102, 103-104, 105-106, 107-108, 109-110, 111-112, 113-114, 115-116, 117-118, 119-120, 121-122, 123-124, 125-126, 127-128, 129-130, 131-132, 133-134, 135-136, 137-138, 139-140, 141-142, 143-144, 145-146, 147-148, 149-150, 151-152, 153-154, 155-156, 157-158, 159-160, 161-162, 163-164, 165-166, 167-168, 169-170, 171-172, 173-174, 175-176, 177-178, 179-180, 181-182, 183-184, 185-186, 187-188, 189-190, 191-192, 193-194, 195-196, 197-198, 199-200, 201-202, 203-204, 205-206, 207-208, 209-210, 211-212, 213-214, 215-216, 217-218, 219-220, 221-222, 223-224, 225-226, 227-228, 229-230, 231-232, 233-234, 235-236, 237-238, 239-240, 241-242, 243-244, 245-246, 247-248, 249-250, 251-252, 253-254, 255-256, 257-258, 259-260, 261-262, 263-264, 265-266, 267-268, 269-270, 271-272, 273-274, 275-276, 277-278, 279-280, 281-282, 283-284, 285-286, 287-288, 289-290, 291-292, 293-294, 295-296, 297-298, 299-300, 301-302, 303-304, 305-306, 307-308, 309-310, 311-312, 313-314, 315-316, 317-318, 319-320, 321-322, 323-324, 325-326, 327-328, 329-330, 331-332, 333-334, 335-336, 337-338, 339-340, 341-342, 343-344, 345-346, 347-348, 349-350, 351-352, 353-354, 355-356, 357-358, 359-360, 361-362, 363-364, 365-366, 367-368, 369-370, 371-372, 373-374, 375-376, 377-378, 379-380, 381-382, 383-384, 385-386, 387-388, 389-390, 391-392, 393-394, 395-396, 397-398, 399-400, 401-402, 403-404, 405-406, 407-408, 409-410, 411-412, 413-414, 415-416, 417-418, 419-420, 421-422, 423-424, 425-426, 427-428, 429-430, 431-432, 433-434, 435-436, 437-438, 439-440, 441-442, 443-444, 445-446, 447-448, 449-450, 451-452, 453-454, 455-456, 457-458, 459-460, 461-462, 463-464, 465-466, 467-468, 469-470, 471-472, 473-474, 475-476, 477-478, 479-480, 481-482, 483-484, 485-486, 487-488, 489-490, 491-492, 493-494, 495-496, 497-498, 499-500, 501-502, 503-504, 505-506, 507-508, 509-510, 511-512, 513-514, 515-516, 517-518, 519-520, 521-522, 523-524, 525-526, 527-528, 529-530, 531-532, 533-534, 535-536, 537-538, 539-540, 541-542, 543-544, 545-546, 547-548, or 549-550; wherein the first antibody or antigen-binding fragment thereof is different from the second antibody or antigen-binding fragment thereof.

[0039] In some embodiments, the second therapeutic agent comprises an anti-inflammatory drug or an antiviral compound. In some embodiments, the antiviral compound comprises a nucleoside analog, a peptoid, an oligopeptide, a polypeptide, a protease inhibitor, a 3C-like protease inhibitor, a papain-like protease inhibitor, or an inhibitor of an RNA dependent RNA polymerase. In some embodiments, the antiviral compound may include: acyclovir, gancyclovir, vidarabine, foscarnet, cidofovir, amantadine, ribavirin, trifluorothymidine, zidovudine, didanosine, zalcitabine, or an interferon. In some embodiments, the interferon is an interferon-a or an interferon-β.

[0040] In some embodiments, the antibody or antigen-binding fragment thereof is administered before, after, or concurrently with the second therapeutic agent or therapy. In some embodiments, the antibody or antigen-binding fragment thereof is administered to the subject intravenously, subcutaneously, or intraperitoneally. In some embodiments, the antibody or antigen-binding fragment thereof is administered prophylactically or therapeutically.

[0041] In another aspect, this disclosure further provides a method for detecting the presence of SARS COV-2 in a sample comprising the steps of: (i) contacting a sample with the antibody or antigen-binding fragment thereof described herein; and (ii) determining binding of the antibody or antigen-binding fragment to one or more SARS COV-2 antigens, wherein binding of the antibody to the one or more SARS COV-2 antigens is indicative of the presence of SARS COV-2 in the sample. In some embodiments, the sample is a blood sample.

[0042] In some embodiments, the SARS-COV-2 antigen comprises a S polypeptide, such as a S polypeptide of a human or an animal SARS-COV-2. In some embodiments, the SARS-COV-2 antigen comprises the N-terminal domain (NTD) of the S polypeptide. In some embodiments, the SARS-COV-2 antigen comprises the supersite b-hairpin (residues 152-158), the β8-strand (residue 97-102), N4-loop (residues 178-188), and/or N-linked glycans at positions N122 and N149 of the S polypeptide. In some embodiments, the SARS-COV-2 antigen comprises residues 27-32, 57-60, 210-218, and/or 286-303 of the S polypeptide. In some embodiments, the SARS-COV-2 antigen comprises residues 600-606 of the S polypeptide.

[0043] In some embodiments, the antibody or antigen-binding fragment thereof is conjugated to a label. In some embodiments, the step of detecting comprises contacting a secondary antibody with the antibody or antigen-binding fragment thereof and wherein the secondary antibody comprises a label. In some embodiments, the label includes a fluorescent label, a chemiluminescent label, a radiolabel, and an enzyme.

[0044] In some embodiments, the step of detecting comprises detecting fluorescence or chemiluminescence. In some embodiments, the step of detecting comprises a competitive binding assay or ELISA.

[0045] In some embodiments, the method further comprises binding the sample to a solid support. In some embodiments, the solid support includes microparticles, microbeads, magnetic beads, and an affinity purification column.

[0046] The foregoing summary is not intended to define every aspect of the disclosure, and additional aspects are described in other sections, such as the following detailed description. The entire document is intended to be related as a unified disclosure, and it should be understood that all combinations of features described herein are contemplated, even if the combination of features are not found together in the same sentence, or paragraph, or section of this document. Other features and advantages of the invention will become apparent from the following detailed description. It should be understood, however, that the detailed description and the specific examples, while indicating specific embodiments of the disclosure, are given by way of illustration only, because various changes and modifications within the spirit and scope of the disclosure will become apparent to those skilled in the art from this detailed description.

### BRIEF DESCRIPTION OF THE DRAWINGS

[0047] FIGS. 1a, 1b, 1c, and 1d are a set of diagrams showing characterization of anti-SARS-COV-2 NTD memory B cells. FIG. 1a shows representative flow cytometry plots showing dual PE-Wuhan-Hu-1 and AlexaFluor-647-Gamma NTD binding B cells for 6 individuals (vaccinees, n=3, non-vaccinees, n=3) at 1.3 months and 12 months. Vaccine recipients are indicated in red. The gating strategy is found in FIG. 9. FIG. ′b shows the number of antigen-specific B cells per 10 million B cells (FIGS. 9b and 9c) obtained at 1.3 months and 12 months from 39 randomly selected individuals (vaccinees n=18, and non-vaccinees, n=21). Each dot is one individual. Red horizontal bars indicate mean values. Statistical significance was determined using two-tailed Mann-Whitney U-tests. FIG. 9b are pie charts showing the distribution of antibody sequences from 6 individuals after 1.3 months (upper panel) or 12 months (lower panel). The number in the inner circle indicates the number of sequences analyzed for the individual denoted above the circle. Pie slice size is proportional to the number of clonally related sequences. The black outline indicates the frequency of clonally expanded sequences detected. Colored slices indicate persisting clones (same IGHV and IGLV genes, with highly similar CDR3s) found at both timepoints in the same patient. Grey slices indicate clones unique to the timepoint. The percentage of BCR clonality from each individual was summarized in the right panel. Statistical significance was determined using two tailed-Wilcoxon matched-pairs signed rank tests. FIG. 1c is a circus plot depicting the relationship between antibodies that share V and J gene segment sequences at both IGH and IGL. Purple, green, and grey lines connect related clones, clones and singles, and singles to each other, respectively. FIG. 1d shows the number of somatic nucleotide mutations in the IGVH and IGVL in antibodies obtained after 1.3 or 12 months from 6 donors. Vaccinees are marked in red. Red horizontal bars indicate mean values. Statistical significance was determined using the Kruskal Wallis test with subsequent Dunn's multiple comparisons.

[0048] FIGS. 2a, 2b, 2c, and 2d are a set of diagrams showing binding and neutralizing activity of anti-SARS-COV-2 NTD antibodies. FIG. 2a are dot plots showing ECsos against SARS-COV-2 Wuhan-Hu-1-, Delta-, Gamma-, or Omicron-NTD for mAbs isolated from convalescents individuals at 1.3- and 12-months after infection. Each dot represents an individual antibody. The horizontal bars indicate geometric mean values. Statistical significance was determined through the two-sided Kruskal Wallis test with subsequent Dunn's multiple comparisons. Pie charts illustrate the fraction of binders (EC50 0-10000 ng/ml, white slices) and non-binders (EC50=10000 ng/ml, grey slices). The inner circle shows the number of antibodies tested per group. The black outline indicates the percentage of non-binders. Statistical significance was determined with the two-sided Fisher's exact test. FIG. 2b are graphs depicting affinity measurements for mAbs obtained 1.3- and 12-months after infection. The left panel shows dissociation constants KD values for 22 clonally paired antibodies from non-vaccinated (blue) and vaccinated individuals (red). The right panel shows KD values for randomly selected antibodies 1.3-(black) and 12-months (red) after infection. Statistical significance was determined with a two-sided Kruskal-Wallis test with subsequent Dunn's multiple comparisons. Horizontal bars indicate geometric mean values. Statistical significance was determined using the Wilcoxon matched-pairs signed rank tests. FIG. 2c are pie charts illustrating the fraction of neutralizing (colored slices) and non-neutralizing (IC50>1000 ng/ml, grey slices) anti-NTD (left) and anti-RBD (right) monoclonal antibodies; the inner circle shows the number of antibodies tested per group. Statistical significance was determined with Fisher's exact test with subsequent Bonferroni-Dunn correction. FIG. 2d is a graph showing a comparison of the frequency distributions of human IGH V genes of anti-SARS-COV-2 NTD neutralizing antibodies from donors at 1.3 months and 12 months after infection. Statistical significance was determined by a two-sided binomial test.

[0049] FIGS. 3a, 3b, 3c, 3d, and 3e are a set of diagrams showing neutralizing breath of anti-SARS-CoV-2 NTD antibodies. FIG. 3a is a graph showing anti-SARS-COV-2 neutralizing activity of monoclonal antibodies measured by a SARS-COV-2 pseudovirus neutralization assay (Robbiani, D. F. et al. Nature 584, 437-442 (2020).). Half-maximal inhibitory concentration (IC50) values for antibodies isolated at 1.3 and 12 months after infection in non-vaccinated (1.3m/12m) and convalescent vaccinated (12m vac) participants. IC₅₀ₛ against Wuhan-Hu-1, gamma, and PMS20 SARS-COV-2. Spike plasmids are based on Wuhan-Hu-1 strain containing the R683G substitution. Each dot represents one antibody. Statistical significance was determined by the two-sided Kruskal Wallis test with subsequent Dunn's multiple comparisons. Horizontal bars and red numbers indicate geometric mean values. FIG. 3b is a heatmap showing neutralizing activity and VH groups of 103 neutralizing antibodies against Wuhan-Hu-1, gamma, and PMS20 SARS-COV-2 pseudovirus. IC50 values are indicated by color (from blue to red, most potent to least potent) with non-neutralizing antibodies (IC50 values of >1000 ng/ml) marked by crossed red tiles. FIG. 3c shows IC50 values for n=6 broadly neutralizing NTD antibodies against the indicated variant SARS-COV-2 pseudoviruses, PMS20, and SARS-COV pseudovirus (left) as well as WT (WA1/2020) and Beta (B.1.351) authentic virus. FIG. 3d shows neutralization curves for the antibodies in FIG. 3c, against Wuhan-Hu-1 pseudovirus. FIG. 3e shows neutralization curves for the antibodies in FIG. 3d, against WT (WA1/2020) and Beta (B.1.351) authentic virus.

[0050] FIGS. 4a and 4b are a set of diagrams showing neutralizing epitope mapping of anti-SARS-CoV-2 NTD antibodies. FIG. 4a is a diagram of the biolayer interferometry experiment. FIG. 4b shows biolayer interferometry results presented as a heat-map of relative inhibition of Ab2 binding to the preformed Ab1-NTD complexes (From red to blue, competing to non-competing). Values are normalized through the subtraction of the autologous antibody control. VH gene usage and IC50 values of Wuhan-Hu-1, Gamma, PMS20, and Omicron (heat map, from blue to red, most potent to least potent) for each antibody are shown. The average of the two experiments is shown.

[0051] FIGS. 5a, 5b, 5c, 5d, 5e, 5f, 5g, 5h, 5i, 5j, and 5k are a set of diagrams showing cryo-EM structures of C1520 and C1717 bound to the SARS-COV-2 S 6P ectodomain. FIG. 5a shows 2.8 Å cryo-EM density for the C1520-S 6P trimer complex. Inset: 3.1 Å locally-refined cryo-EM density for C1520 variable domains (shades of green) bound to NTD (wheat). FIG. 5b shows a close-up view of C1520 variable domains (green ribbon) binding to NTD (surface rendering, wheat). Site i antigenic supersite is highlighted on NTD for reference (salmon). FIG. 5c shows surface rendering of C1520 epitope (green) with CDR loops shown (inset). NTD epitope residues (defined as residues containing atom(s) within 4 Å of a Fab atom) are shown as sticks. FIG. 5d shows CDRH3-mediated contacts on the NTD. Potential hydrogen bonds are shown as black dashed lines. FIG. 5e shows an overlay of WT (WA1/2020) NTD (this study) and unliganded Omicron NTD (PDB 7TB4) with mutations and loop conformational changes highlighted in red. FIG. 5f shows 3.5 Å cryo-EM density for the C1717-S 6P trimer complex. Inset: C1717 variable domains (shades of purple) binding to a S1 protomer (surface rendering). The fusion peptide (FP, red) in the S2 domain is shown. FIG. 5g shows surface rendering of C1717 epitope (thistle) with C1717 CDR loops shown as ribbon. FIGS. 5h, 5i, 5j, and 5k show residue-level contacts between C1717 (purple), NTD (wheat), and the SD2 domain (gray). Omicron mutations in the N5 loop are shown as red spheres in panel FIG. 5k.

[0052] FIGS. 6a, 6b, 6c, and 6d are a set of diagrams showing plasma anti-SARS-COV-2 NTD reactivity. FIGS. 6a and 6b show plasma IgG antibody binding to Wuhan-Hu-1 NTD (FIG. 6a) and Omicron NTD protein (FIG. 6b) in unvaccinated and vaccinated (vac) convalescent individuals at 1.3 months and 12 months after infection (n=62). Graphs showing ELISA curves from non-vaccinated (blue lines) and vaccinated convalescent individuals (red lines) (left panels). The area under the curve (AUC) over time in non-vaccinated and vaccinated individuals, as indicated (middle panels). Lines connect longitudinal samples. Two outliers who received their first dose of vaccine 24-48 hours before sample collection are depicted in purple. Numbers in red indicate geometric mean AUC at the indicated timepoint. FIGS. 6c and 6d, same as FIG. 6a, shown as IgM (FIG. 6c) and IgA (FIG. 6d) antibody binding to SARS-COV-2 NTD 1.3- and 12-months after infection. Statistical significance was determined using Wilcoxon matched-pairs signed rank tests. The right panel shows combined values as a dot plot for all individuals. Statistical significance was determined through the Kruskal Wallis test with subsequent Dunn's multiple comparisons.

[0053] FIGS. 7a, 7b, 7c, 7d, 7e, 7f, 7g, 7h, 7i, 7j, 7k, 7l, 7m, 7n, 7o, 7p, and 7q are a set of diagrams showing clinical correlations of plasma anti-SARS-COV-2 NTD antibody titers. FIGS. 7a, 7b, and 7c show clinical correlations of plasma anti-NTD IgG titers at 1.3month after infection. Duration of Symptom (Sx) in days (X axis) plotted against normalized AUC for plasma IgG (FIG. 7a), IgM (FIG. 7b), and IgA (FIG. 7c) binding to NTD (Y axis). FIGS. 7d, 7e, and 7f show Sx onset to time of sample collection in days plotted against normalized AUC for plasma IgG (FIG. 7d), IgM (FIG. 7e), and IgA (FIG. 7f) anti-NTD. FIGS. 7g, 7h, and 7i show Sx severity plotted against normalized AUC for plasma IgG (FIG. 7g), IgM (FIG. 7h), and IgA (FIG. 7i) anti-NTD. FIGS. 7j, 7k, and 7l show age plotted against normalized AUC for plasma IgG (FIG. 7j), IgM (FIG. 7k), and IgA (FIG. 7l) anti-NTD. FIG. 7m shows normalized plasma IgG, IgM, and IgA AUC for males (n=34) and females (n=28). FIG. 7n shows normalized plasma IgG, IgM, and IgA AUC for case (n=51) and contact (n=8). FIG. 70 shows normalized plasma IgG, IgM and IgA AUC for outpatient (n=56) and hospitalized (n=6). FIG. 7p shows anti-NTD IgG, NTD/RBD IgG ratio, and NTD/N IgG ratio at 12 months post-infection in individuals reporting persistent symptoms (+) compared to individuals who are symptom-free (−) 12 months post-infection. FIG. 7q shows correlation of remaining plasma titers at 12 months (expressed as the fraction of 1.3-month titers on the Y axis) and participant age for anti-NTD IgG (left), anti-NTD IgM (middle), anti-NTD IgA (right). For FIGS. 7a, 7b, 7c, 7d, 7e, 7f, 7g, 7h, 7i, 7j, 7k, 7l, and 7q show the correlations were analyzed by two-tailed Spearman's tests; For FIGS. 7m, 7n, 7o, 7p, and 7q shows that statistical significance was determined using two-tailed Mann-Whitney U-tests.

[0054] FIGS. 8a, 8b, 8c, 8d, 8e, 8f, 8g, 8h, 8i, 8j, 8k, 8l, and 8m are a set of diagrams showing plasma activity. FIG. 8a shows correlation of 1.3-(left) and 12-month (right) titers of anti-NTD IgG and anti-RBD IgG at each timepoint, separately. FIG. 8b shows correlation of 1.3-(left) and 12-month (right) titers of anti-NTD IgG and NT50 at each timepoint, separately. FIG. 8c shows correlation of 1.3-month plasma titers of anti-NTD IgG and purified plasma IgG IC₅₀. FIG. 8d shows correlation of 1.3-(left) and 12-month (right) plasma titers of anti-NTD IgM and anti-RBD IgM. FIG. 8e shows correlation of 1.3-(left) and 12-month (right) plasma titers of anti-NTD IgM and NT50. FIG. 8f shows correlation of 1.3-(left) and 12-month (right) plasma titers of anti-NTD IgA and anti-RBD IgA. FIG. 8g shows correlation of 1.3-(left) and 12-month (right) plasma titers of anti-NTD IgA and NT50. FIG. 8h shows correlation of 1.3-month plasma titers of anti-NTD IgA and purified plasma IgA IC₅₀. FIG. 8i shows correlation of 1.3-(left) and 12-month (right) plasma titers of anti-NTD IgG and anti-N IgG. FIG. 8j shows correlation of 1.3-(left) and 12-month (right) plasma titers of anti-NTD IgG and anti-NTD IgM. FIG. 8k shows correlation of 1.3-(left) and 12-month (right) plasma titers of anti-NTD IgG and anti-NTD IgA. FIG. 8l shows correlation of remaining plasma titers at 12 months (expressed as the fraction of 1.3-month titers on the Y axis) and 1.3-month plasma titers of anti-NTD IgG (left), anti-NTD IgM (middle), anti-NTD IgA (right). FIG. 8m shows correlation of remaining plasma titers of anti-NTD IgG (left), anti-NTD IgM (middle), anti-NTD IgA (right) (expressed as the fraction of 1.3-month titers on the Y axis), and plasma NT50 at 12 months. Blue and red are unvaccinated and vaccinated individuals, respectively. Statistical significance was determined using the Spearman correlation test for the non-vaccinated and vaccinated subgroups independently. All experiments were performed at least in duplicate.

[0055] FIGS. 9a, 9b, 9c, and 9d are a set of diagrams showing the flow cytometry results. FIG. 9a shows a gating strategy. Gating was on singlets that were CD20+ or CD19+ and CD3-CD8-CD16-Ova-. Anti-IgG, IgM, IgA, IgD, CD71, and CD27 antibodies were used for B cell phenotype analysis. Sorted cells were NTD-PE+ and NTD-AF647+. FIGS. 9b and 9c show the flow cytometry results depicting the percentage of NTD-double positive (FIG. 9b) and AF647-mutant NTD cross-reactive (FIG. 9c) memory B cells from 1.3- and 12-months post-infection in 39 selected patients. FIG. 9d shows the results of B cell phenotyping. Expression of CD71, IgG, IgA, IgM in antigen-specific memory B cells. Each dot is one individual. Horizontal bars indicate mean values. Statistical significance was determined using two-tailed Mann-Whitney U-tests (FIG. 9b) and Kruskal Wallis test with subsequent Dunn's multiple comparisons (FIG. 9d).

[0056] FIGS. 10a, 10b, and 10c are a set of diagrams showing frequency distribution of human V genes. Comparison of the frequency distribution of human V genes for heavy chain and light chains of anti-NTD antibodies from this study and from a database of shared clonotypes of human B cell receptor generated by Cinque Soto et al. (Soto, C. et al. Nature 566, 398-402 (2019).). FIGS. 10a and 10b are graphs showing relative abundance of human IGVH, IGVK, and IGVL genes Sequence Read Archive accession SRP010970 (orange), 1.3-(FIG. 10a), and 12-month antibodies (FIG. 10b). FIG. 10c, same as FIGS. 10a and 10b, but shows the comparison between Sequence Read Archive accession SRP010970 (orange) and combined (1.3m and 12m) anti-NTD antibodies (blue). Statistical significance was determined by a two-sided binomial test. Significant differences are denoted with stars.

[0057] FIGS. 11a and 11b are a set of diagrams showing CDR3 length and hydrophobicity of anti-SARS-COV-2 NTD antibodies. FIG. 11a shows IGVH and IGVL CDR3s length (Y axis) for anti-SARS-COV-2 NTD antibodies isolated from 6 individuals 1.3- and 12-months after infection. Vaccinees are marked in red. Statistical significance was determined using the Kruskal Wallis test with subsequent Dunn's multiple comparisons. FIG. 11b shows distribution of the hydrophobicity GRAVY scores at the IGH CDR3 in antibody sequences from this study compared to a public database (see Methods for statistical analysis). The box limits are at the lower and upper quartiles, the center line indicates the median, the whiskers are 1.5× interquartile range, and the dots represent outliers.

[0058] FIGS. 12a and 12b are a set of diagrams showing binding curves of anti-SARS-COV-2 NTD monoclonal antibodies. FIG. 12a shows ELISA binding curves of mAbs isolated from convalescents individuals at 1.3- and 12 months after infection, ECsos against SARS-COV-2 Wuhan-Hu-1-, Delta-, Gama- or Omicron-NTD were shown. FIG. 12b shows biolayer interferometry association and dissociation curves for 1.3-(black), 12-month convalescents (blue lines), and 12-month convalescent vaccinees (red lines).

[0059] FIGS. 13a and 13b are a set of diagrams showing characterization of the anti-SARS-COV-2 NTD monoclonal antibodies. FIG. 13a, corresponding to FIG. 3a, are pie charts illustrating the fraction of neutralizing (white slices) and non-neutralizing (grey slices) antibodies; the inner circle shows the number of antibodies tested per group. Statistical significance was determined with Fisher's exact test with subsequent Bonferroni-Dunn correction. FIG. 13b is a graph showing anti-SARS-COV-2 neutralizing activity of shared clones of antibodies isolated 1.3- and 12-months after infection, measured by a SARS-COV-2 pseudovirus neutralization assay. Statistical significance was determined through the Friedman test with subsequent Dunn's multiple comparisons. Horizontal bars and red numbers indicate geometric mean values. FIG. 14c is a graph showing comparison of the frequency distributions of human IGK and IGL V genes of anti-SARS-COV-2 NTD neutralizing antibodies from donors at 1.3 months and 12 months after infection. Statistical significance was determined by a two-sided binomial test.

[0060] FIGS. 14a, 14b, 14c, 14d, 14e, 14f, 14g, 14h, 14i, 14j, and 14k are a set of diagrams showing cryo-EM data processing and validation. FIGS. 14a, 14b, 14c, 14d, 14e, and 14f show representative micrographs selected from total datasets (see Table 5), 2D class averages, and gold-standard FSC plots for FIGS. 14a and 14d C1520-S 6P; FIGS. 14b and 14e C1717-S 6P; and FIGS. 14c and 14f C1791-S 6P. FIGS. 14g, 14h, and 14i show local resolution estimations for FIG. 14g, C1520-S, FIG. 14h, C1717-S, and FIG. 14i, C1791-S complexes. Insets show resolution estimates for Fab-NTD focused refinements. FIG. 14j shows a composite model illustrating non-overlapping epitopes of NTD-targeting mAbs (C1520-green; C1717-purple; C1791-slate blue) bound to a single NTD (wheat) on a spike trimer. The site i antigenic supersite (coral) is shown as a reference. FIG. 14k shows structural superposition of NTD-targeting antibodies C1791 (slate blue) and S2L20 (gray-PDB 7N81) on a NTD (wheat surface rendering). The NTD site i antigenic supersite is depicted as in panel FIG. 14j. Cryo-EM density for the C1791-S is also shown (inset).

[0061] FIGS. 15 and 15b are a set of diagrams showing comparison of C1520-like NTD neutralizing antibodies. FIG. 15a shows overlay of VH and VL domains of C1520 (green), S2X303 (PDB 7SOF; powder blue), Ab5-7 (PDB 7RW2; gold), and P008-056 (PDB 7NTC; orange) after alignment on NTD residues 27-303, illustrating distinct binding poses to NTD epitopes adjacent to the site i supersite (coral). FIG. 15b shows comparison of CDRH3 loop position, the NTD supersite b-hairpin (coral), and NTD N4-loop (orchid) for antibodies shown in panel FIG. 15a.

### DETAILED DESCRIPTION OF THE INVENTION

[0062] SARS-COV-2 represents a serious public health concern. Methods and agents for diagnosing and treating persons who are infected with SARS-COV-2 provide the opportunity to either prevent or control further spread of infection by SARS-COV-2. The worrisome emergence of SARS-COV-2 variants of concern, such as B.1.1.7 (201, Alpha), B.1.351 (20H, Beta), P.1 (20J, Gamma), B.1.617.2 (21A, Delta), and B.1.1.529 (21K/Omicron) that have been responsible for a series surges in reported COVID-19 cases, emphasizes the need for agents having broad neutralizing activities against various SARS-COV-2 variants of concern.

[0063] This invention is based, at least in part, on unexpected broadly neutralizing activities of the disclosed anti-SARS-COV-2 antibodies or antigen-binding fragments thereof. These antibodies and antigen-binding fragments target the N-terminal domain (NTD) of the spike(S) protein and exhibit unexpected broadly neutralizing activities against several SARS-COV-2 variants of concern. Thus, the disclosed anti-SARS-COV-2 antibodies and antigen-binding fragments represent a novel and effective therapeutic strategy in protecting from SARS-COV-2 infections.

### Neutralizing Anti-Sars-Cov-2 Antibodies

### Antibodies

[0064] The invention disclosed herein involves neutralizing anti-SARS-COV-2 antibodies or antigen-binding fragments thereof. These antibodies refer to a class of broadly neutralizing antibodies that neutralize multiple SARS-COV-2 virus strains. The antibodies are able to protect a subject prophylactically and therapeutically against a lethal challenge with a SARS-COV-2 virus.

[0065] In one aspect, this disclosure provides an isolated anti-SARS-COV-2 antibody or antigen-binding fragment thereof that binds specifically to a SARS-COV-2 antigen. In some embodiments, the SARS-COV-2 antigen comprises a portion of a spike(S) polypeptide, such as a S polypeptide of a human or an animal SARS-COV-2.

[0066] In some embodiments, the SARS-COV-2 antigen comprises the N-terminal domain (NTD) (e.g., residues 14-305) of the S polypeptide. In some embodiments, the SARS-COV-2 antigen comprises the supersite b-hairpin (residues 152-158), the β8-strand (residue 97-102), N4-loop (residues 178-188), and/or N-linked glycans at positions N122 and N149 of the S polypeptide. In some embodiments, the SARS-COV-2 antigen comprises residues 27-32, 57-60, 210-218, and/or 286-303 of the S polypeptide. In some embodiments, the SARS-COV-2 antigen comprises residues 600-606 of the S polypeptide.

[0067] In some embodiments, the antibody or antigen-binding fragment thereof is capable of neutralizing a SARS-COV-2 virus at an IC₅₀ concentration of less than 50 (e.g., 1, 5, 10, 20, 30, 40, 50) μg/ml.

[0068] The spike protein is important because it is present on the outside of intact SARS-COV-2. Thus, it presents a target that can be used to inhibit or eliminate an intact virus before the virus has an opportunity to infect a cell. A representative amino acid sequence is provided below:

(Accession ID: NC_045512.2)
(SEQ ID NO: 4713)
MFVFLVLLPLVSSQCVNLTTRTQLPPAYTNSFTRGVYYPDKVFRSSVLH
STQDLFLPFFSNVTWFHAIHVSGTNGTKRFDNPVLPFNDGVYFASTEKS
NIIRGWIFGTTLDSKTQSLLIVNNATNVVIKVCEFQFCNDPFLGVYYHK
NNKSWMESEFRVYSSANNCTFEYVSQPFLMDLEGKQGNFKNLREFVFKN
IDGYFKIYSKHTPINLVRDLPQGFSALEPLVDLPIGINITRFQTLLALH
RSYLTPGDSSSGWTAGAAAYYVGYLQPRTFLLKYNENGTITDAVDCALD
PLSETKCTLKSFTVEKGIYQTSNFRVQPTESIVRFPNITNLCPFGEVFN
ATRFASVYAWNRKRISNCVADYSVLYNSASFSTFKCYGVSPTKLNDLCF
TNVYADSFVIRGDEVRQIAPGQTGKIADYNYKLPDDFTGCVIAWNSNNL
DSKVGGNYNYLYRLFRKSNLKPFERDISTEIYQAGSTPCNGVEGFNCYF
PLQSYGFQPTNGVGYQPYRVVVLSFELLHAPATVCGPKKSTNLVKNKCV
NFNFNGLTGTGVLTESNKKFLPFQQFGRDIADTTDAVRDPQTLEILDIT
PCSFGGVSVITPGTNTSNQVAVLYQDVNCTEVPVAIHADQLTPTWRVYS
TGSNVFQTRAGCLIGAEHVNNSYECDIPIGAGICASYQTQTNSPRRARS
VASQSIIAYTMSLGAENSVAYSNNSIAIPTNFTISVTTEILPVSMTKTS
VDCTMYICGDSTECSNLLLQYGSFCTQLNRALTGIAVEQDKNTQEVFAQ
VKQIYKTPPIKDFGGFNFSQILPDPSKPSKRSFIEDLLFNKVTLADAGF
IKQYGDCLGDIAARDLICAQKFNGLTVLPPLLTDEMIAQYTSALLAGTI
TSGWTFGAGAALQIPFAMQMAYRFNGIGVTQNVLYENQKLIANQFNSAI
GKIQDSLSSTASALGKLQDVVNQNAQALNTLVKQLSSNFGAISSVLNDI
LSRLDKVEAEVQIDRLITGRLQSLQTYVTQQLIRAAEIRASANLAATKM
SECVLGQSKRVDFCGKGYHLMSFPQSAPHGVVFLHVTYVPAQEKNFTTA
PAICHDGKAHFPREGVFVSNGTHWFVTQRNFYEPQIITTDNTFVSGNCD
VVIGIVNNTVYDPLQPELDSFKEELDKYFKNHTSPDVDLGDISGINASV
VNIQKEIDRLNEVAKNLNESLIDLQELGKYEQYIKWPWYIWLGFIAGLI
AIVMVTIMLCCMTSCCSCLKGCCSCGSCCKFDEDDSEPVLKGVKLHYT

[0069] The total length of SARS-COV-2 S is 1273 amino acids and consists of a signal peptide (amino acids 1-13) located at the N-terminus, the S1 subunit (14-685 residues), and the S2 subunit (686-1273 residues); the last two regions are responsible for receptor binding and membrane fusion, respectively. In the S1 subunit, there is an N-terminal domain (14-305 residues) and a receptor-binding domain (RBD, 319-541 residues); the fusion peptide (FP) (788-806 residues), heptapeptide repeat sequence 1 (HR1) (912-984 residues), HR2 (1163-1213 residues), TM domain (1213-1237 residues), and cytoplasm domain (1237-1273 residues) comprise the S2 subunit. S protein trimers visually form a characteristic bulbous, crown-like halo surrounding the viral particle. Based on the structure of coronavirus S protein monomers, the S1 and S2 subunits form the bulbous head and stalk region.

[0070] Listed below in Tables 2 and 3 are amino acid sequences of the heavy chain (HC) variable regions (HCVR) and light chain (LC) variable regions (LCVR) of exemplary antibodies.

[0071] In some embodiments, the antibody or antigen-binding fragment thereof comprises: (i) a heavy chain variable region having an amino acid sequence with at least 75% (e.g., 75%, 78%, 80%, 82%, 84%, 85%, 86%, 88%, 90%, 92%, 94%, 95%, 96%, 97%, 98%, 99%) identity to one selected from those in Table 2 or 3; and/or (ii) a light chain variable region having an amino acid sequence with at least 75% (e.g., 75%, 78%, 80%, 82%, 84%, 85%, 86%, 88%, 90%, 92%, 94%, 95%, 96%, 97%, 98%, 99%) identity to one selected from those in Table 2 or 3.

[0072] In some embodiments, the antibody or antigen-binding fragment thereof comprises: (i) a heavy chain variable region having an amino acid sequence selected from those in Table 2 or 3; and/or (ii) a light chain variable region having an amino acid sequence selected from those in Table 2 or 3.

[0073] In some embodiments, the antibody or antigen-binding fragment thereof comprises a heavy chain variable region and a light chain variable region that comprises an amino acid sequence pair selected from those in Table 2 or 3.

[0074] In some embodiments, the antibody or antigen-binding fragment thereof comprises three heavy chain complementarity determining regions (HCDRs) (HCDR1, HCDR2, and HCDR3) of a heavy chain variable region having the amino acid sequence of SEQ ID NO: 1, 3, 5, 7, 9, 11, 13, 15, 17, 19, 21, 23, 25, 27, 29, 31, 33, 35, 37, 39, 41, 43, 45, 47, 49, 51, 53, 55, 57, 59, 61, 63, 65, 67, 69, 71, 73, 75, 77, 79, 81, 83, 85, 87, 89, 91, 93, 95, 97, 99, 101, 103, 105, 107, 109, 111, 113, 115, 117, 119, 121, 123, 125, 127, 129, 131, 133, 135, 137, 139, 141, 143, 145, 147, 149, 151, 153, 155, 157, 159, 161, 163, 165, 167, 169, 171, 173, 175, 177, 179, 181, 183, 185, 187, 189, 191, 193, 195, 197, 199, 201, 203, 205, 207, 209, 211, 213, 215, 217, 219, 221, 223, 225, 227, 229, 231, 233, 235, 237, 239, 241, 243, 245, 247, 249, 251, 253, 255, 257, 259, 261, 263, 265, 267, 269, 271, 273, 275, 277, 279, 281, 283, 285, 287, 289, 291, 293, 295, 297, 299, 301, 303, 305, 307, 309, 311, 313, 315, 317, 319, 321, 323, 325, 327, 329, 331, 333, 335, 337, 339, 341, 343, 345, 347, 349, 351, 353, 355, 357, 359, 361, 363, 365, 367, 369, 371, 373, 375, 377, 379, 381, 383, 385, 387, 389, 391, 393, 395, 397, 399, 401, 403, 405, 407, 409, 411, 413, 415, 417, 419, 421, 423, 425, 427, 429, 431, 433, 435, 437, 439, 441, 443, 445, 447, 449, 451, 453, 455, 457, 459, 461, 463, 465, 467, 469, 471, 473, 475, 477, 479, 481, 483, 485, 487, 489, 491, 493, 495, 497, 499, 501, 503, 505, 507, 509, 511, 513, 515, 517, 519, 521, 523, 525, 527, 529, 531, 533, 535, 537, 539, 541, 543, 545, 547, or 549; and three light chain CDRs (LCDR1, LCDR2, and LCDR3) of a light chain variable region having the amino acid sequence of SEQ ID NO: 2, 4, 6, 8, 10, 12, 14, 16, 18, 20, 22, 24, 26, 28, 30, 32, 34, 36, 38, 40, 42, 44, 46, 48, 50, 52, 54, 56, 58, 60, 62, 64, 66, 68, 70, 72, 74, 76, 78, 80, 82, 84, 86, 88, 90, 92, 94, 96, 98, 100, 102, 104, 106, 108, 110, 112, 114, 116, 118, 120, 122, 124, 126, 128, 130, 132, 134, 136, 138, 140, 142, 144, 146, 148, 150, 152, 154, 156, 158, 160, 162, 164, 166, 168, 170, 172, 174, 176, 178, 180, 182, 184, 186, 188, 190, 192, 194, 196, 198, 200, 202, 204, 206, 208, 210, 212, 214, 216, 218, 220, 222, 224, 226, 228, 230, 232, 234, 236, 238, 240, 242, 244, 246, 248, 250, 252, 254, 256, 258, 260, 262, 264, 266, 268, 270, 272, 274, 276, 278, 280, 282, 284, 286, 288, 290, 292, 294, 296, 298, 300, 302, 304, 306, 308, 310, 312, 314, 316, 318, 320, 322, 324, 326, 328, 330, 332, 334, 336, 338, 340, 342, 344, 346, 348, 350, 352, 354, 356, 358, 360, 362, 364, 366, 368, 370, 372, 374, 376, 378, 380, 382, 384, 386, 388, 390, 392, 394, 396, 398, 400, 402, 404, 406, 408, 410, 412, 414, 416, 418, 420, 422, 424, 426, 428, 430, 432, 434, 436, 438, 440, 442, 444, 446, 448, 450, 452, 454, 456, 458, 460, 462, 464, 466, 468, 470, 472, 474, 476, 478, 480, 482, 484, 486, 488, 490, 492, 494, 496, 498, 500, 502, 504, 506, 508, 510, 512, 514, 516, 518, 520, 522, 524, 526, 528, 530, 532, 534, 536, 538, 540, 542, 544, 546, 548, or 550.

[0075] In some embodiments, the antibody or antigen-binding fragment thereof comprises: a heavy chain variable region comprising an amino acid sequence with at least 75% (e.g., 75%, 78%, 80%, 82%, 84%, 85%, 86%, 88%, 90%, 92%, 94%, 95%, 96%, 97%, 98%, 99%) identity to the amino acid sequence of SEQ ID NO: 1, 3, 5, 7, 9, 11, 13, 15, 17, 19, 21, 23, 25, 27, 29, 31, 33, 35, 37, 39, 41, 43, 45, 47, 49, 51, 53, 55, 57, 59, 61, 63, 65, 67, 69, 71, 73, 75, 77, 79, 81, 83, 85, 87, 89, 91, 93, 95, 97, 99, 101, 103, 105, 107, 109, 111, 113, 115, 117, 119, 121, 123, 125, 127, 129, 131, 133, 135, 137, 139, 141, 143, 145, 147, 149, 151, 153, 155, 157, 159, 161, 163, 165, 167, 169, 171, 173, 175, 177, 179, 181, 183, 185, 187, 189, 191, 193, 195, 197, 199, 201, 203, 205, 207, 209, 211, 213, 215, 217, 219, 221, 223, 225, 227, 229, 231, 233, 235, 237, 239, 241, 243, 245, 247, 249, 251, 253, 255, 257, 259, 261, 263, 265, 267, 269, 271, 273, 275, 277, 279, 281, 283, 285, 287, 289, 291, 293, 295, 297, 299, 301, 303, 305, 307, 309, 311, 313, 315, 317, 319, 321, 323, 325, 327, 329, 331, 333, 335, 337, 339, 341, 343, 345, 347, 349, 351, 353, 355, 357, 359, 361, 363, 365, 367, 369, 371, 373, 375, 377, 379, 381, 383, 385, 387, 389, 391, 393, 395, 397, 399, 401, 403, 405, 407, 409, 411, 413, 415, 417, 419, 421, 423, 425, 427, 429, 431, 433, 435, 437, 439, 441, 443, 445, 447, 449, 451, 453, 455, 457, 459, 461, 463, 465, 467, 469, 471, 473, 475, 477, 479, 481, 483, 485, 487, 489, 491, 493, 495, 497, 499, 501, 503, 505, 507, 509, 511, 513, 515, 517, 519, 521, 523, 525, 527, 529, 531, 533, 535, 537, 539, 541, 543, 545, 547, or 549; or comprising the amino acid sequence of SEQ ID NO: 1, 3, 5, 7, 9, 11, 13, 15, 17, 19, 21, 23, 25, 27, 29, 31, 33, 35, 37, 39, 41, 43, 45, 47, 49, 51, 53, 55, 57, 59, 61, 63, 65, 67, 69, 71, 73, 75, 77, 79, 81, 83, 85, 87, 89, 91, 93, 95, 97, 99, 101, 103, 105, 107, 109, 111, 113, 115, 117, 119, 121, 123, 125, 127, 129, 131, 133, 135, 137, 139, 141, 143, 145, 147, 149, 151, 153, 155, 157, 159, 161, 163, 165, 167, 169, 171, 173, 175, 177, 179, 181, 183, 185, 187, 189, 191, 193, 195, 197, 199, 201, 203, 205, 207, 209, 211, 213, 215, 217, 219, 221, 223, 225, 227, 229, 231, 233, 235, 237, 239, 241, 243, 245, 247, 249, 251, 253, 255, 257, 259, 261, 263, 265, 267, 269, 271, 273, 275, 277, 279, 281, 283, 285, 287, 289, 291, 293, 295, 297, 299, 301, 303, 305, 307, 309, 311, 313, 315, 317, 319, 321, 323, 325, 327, 329, 331, 333, 335, 337, 339, 341, 343, 345, 347, 349, 351, 353, 355, 357, 359, 361, 363, 365, 367, 369, 371, 373, 375, 377, 379, 381, 383, 385, 387, 389, 391, 393, 395, 397, 399, 401, 403, 405, 407, 409, 411, 413, 415, 417, 419, 421, 423, 425, 427, 429, 431, 433, 435, 437, 439, 441, 443, 445, 447, 449, 451, 453, 455, 457, 459, 461, 463, 465, 467, 469, 471, 473, 475, 477, 479, 481, 483, 485, 487, 489, 491, 493, 495, 497, 499, 501, 503, 505, 507, 509, 511, 513, 515, 517, 519, 521, 523, 525, 527, 529, 531, 533, 535, 537, 539, 541, 543, 545, 547, or 549; and/or a light chain variable region comprising an amino acid sequence with at least 75% (e.g., 75%, 78%, 80%, 82%, 84%, 85%, 86%, 88%, 90%, 92%, 94%, 95%, 96%, 97%, 98%, 99%) identity to the amino acid sequence of SEQ ID NO: 2, 4, 6, 8, 10, 12, 14, 16, 18, 20, 22, 24, 26, 28, 30, 32, 34, 36, 38, 40, 42, 44, 46, 48, 50, 52, 54, 56, 58, 60, 62, 64, 66, 68, 70, 72, 74, 76, 78, 80, 82, 84, 86, 88, 90, 92, 94, 96, 98, 100, 102, 104, 106, 108, 110, 112, 114, 116, 118, 120, 122, 124, 126, 128, 130, 132, 134, 136, 138, 140, 142, 144, 146, 148, 150, 152, 154, 156, 158, 160, 162, 164, 166, 168, 170, 172, 174, 176, 178, 180, 182, 184, 186, 188, 190, 192, 194, 196, 198, 200, 202, 204, 206, 208, 210, 212, 214, 216, 218, 220, 222, 224, 226, 228, 230, 232, 234, 236, 238, 240, 242, 244, 246, 248, 250, 252, 254, 256, 258, 260, 262, 264, 266, 268, 270, 272, 274, 276, 278, 280, 282, 284, 286, 288, 290, 292, 294, 296, 298, 300, 302, 304, 306, 308, 310, 312, 314, 316, 318, 320, 322, 324, 326, 328, 330, 332, 334, 336, 338, 340, 342, 344, 346, 348, 350, 352, 354, 356, 358, 360, 362, 364, 366, 368, 370, 372, 374, 376, 378, 380, 382, 384, 386, 388, 390, 392, 394, 396, 398, 400, 402, 404, 406, 408, 410, 412, 414, 416, 418, 420, 422, 424, 426, 428, 430, 432, 434, 436, 438, 440, 442, 444, 446, 448, 450, 452, 454, 456, 458, 460, 462, 464, 466, 468, 470, 472, 474, 476, 478, 480, 482, 484, 486, 488, 490, 492, 494, 496, 498, 500, 502, 504, 506, 508, 510, 512, 514, 516, 518, 520, 522, 524, 526, 528, 530, 532, 534, 536, 538, 540, 542, 544, 546, 548, or 550; or comprising the amino acid sequence of SEQ ID NO: 2, 4, 6, 8, 10, 12, 14, 16, 18, 20, 22, 24, 26, 28, 30, 32, 34, 36, 38, 40, 42, 44, 46, 48, 50, 52, 54, 56, 58, 60, 62, 64, 66, 68, 70, 72, 74, 76, 78, 80, 82, 84, 86, 88, 90, 92, 94, 96, 98, 100, 102, 104, 106, 108, 110, 112, 114, 116, 118, 120, 122, 124, 126, 128, 130, 132, 134, 136, 138, 140, 142, 144, 146, 148, 150, 152, 154, 156, 158, 160, 162, 164, 166, 168, 170, 172, 174, 176, 178, 180, 182, 184, 186, 188, 190, 192, 194, 196, 198, 200, 202, 204, 206, 208, 210, 212, 214, 216, 218, 220, 222, 224, 226, 228, 230, 232, 234, 236, 238, 240, 242, 244, 246, 248, 250, 252, 254, 256, 258, 260, 262, 264, 266, 268, 270, 272, 274, 276, 278, 280, 282, 284, 286, 288, 290, 292, 294, 296, 298, 300, 302, 304, 306, 308, 310, 312, 314, 316, 318, 320, 322, 324, 326, 328, 330, 332, 334, 336, 338, 340, 342, 344, 346, 348, 350, 352, 354, 356, 358, 360, 362, 364, 366, 368, 370, 372, 374, 376, 378, 380, 382, 384, 386, 388, 390, 392, 394, 396, 398, 400, 402, 404, 406, 408, 410, 412, 414, 416, 418, 420, 422, 424, 426, 428, 430, 432, 434, 436, 438, 440, 442, 444, 446, 448, 450, 452, 454, 456, 458, 460, 462, 464, 466, 468, 470, 472, 474, 476, 478, 480, 482, 484, 486, 488, 490, 492, 494, 496, 498, 500, 502, 504, 506, 508, 510, 512, 514, 516, 518, 520, 522, 524, 526, 528, 530, 532, 534, 536, 538, 540, 542, 544, 546, 548, or 550.

[0076] A person of ordinary skill in the art will understand that various CDR numbering schemes (such as the Kabat, Chothia, Enhanced Chothia, IMGT, AHoAbM, Contact numbering schemes) can be used to determine CDR positions.

[0077] In some embodiments, the antibody or antigen-binding fragment thereof comprises a heavy chain variable region (HCVR) and a light chain variable region (LCVR) that comprise a HCVR/LCVR amino acid sequence pair of SEQ ID NOs: 1-2, 3-4, 5-6, 7-8, 9-10, 11-12, 13-14, 15-16, 17-18, 19-20, 21-22, 23-24, 25-26, 27-28, 29-30, 31-32, 33-34, 35-36, 37-38, 39-40, 41-42, 43-44, 45-46, 47-48, 49-50, 51-52, 53-54, 55-56, 57-58, 59-60, 61-62, 63-64, 65-66, 67-68, 69-70, 71-72, 73-74, 75-76, 77-78, 79-80, 81-82, 83-84, 85-86, 87-88, 89-90, 91-92, 93-94, 95-96, 97-98, 99-100, 101-102, 103-104, 105-106, 107-108, 109-110, 111-112, 113-114, 115-116, 117-118, 119-120, 121-122, 123-124, 125-126, 127-128, 129-130, 131-132, 133-134, 135-136, 137-138, 139-140, 141-142, 143-144, 145-146, 147-148, 149-150, 151-152, 153-154, 155-156, 157-158, 159-160, 161-162, 163-164, 165-166, 167-168, 169-170, 171-172, 173-174, 175-176, 177-178, 179-180, 181-182, 183-184, 185-186, 187-188, 189-190, 191-192, 193-194, 195-196, 197-198, 199-200, 201-202, 203-204, 205-206, 207-208, 209-210, 211-212, 213-214, 215-216, 217-218, 219-220, 221-222, 223-224, 225-226, 227-228, 229-230, 231-232, 233-234, 235-236, 237-238, 239-240, 241-242, 243-244, 245-246, 247-248, 249-250, 251-252, 253-254, 255-256, 257-258, 259-260, 261-262, 263-264, 265-266, 267-268, 269-270, 271-272, 273-274, 275-276, 277-278, 279-280, 281-282, 283-284, 285-286, 287-288, 289-290, 291-292, 293-294, 295-296, 297-298, 299-300, 301-302, 303-304, 305-306, 307-308, 309-310, 311-312, 313-314, 315-316, 317-318, 319-320, 321-322, 323-324, 325-326, 327-328, 329-330, 331-332, 333-334, 335-336, 337-338, 339-340, 341-342, 343-344, 345-346, 347-348, 349-350, 351-352, 353-354, 355-356, 357-358, 359-360, 361-362, 363-364, 365-366, 367-368, 369-370, 371-372, 373-374, 375-376, 377-378, 379-380, 381-382, 383-384, 385-386, 387-388, 389-390, 391-392, 393-394, 395-396, 397-398, 399-400, 401-402, 403-404, 405-406, 407-408, 409-410, 411-412, 413-414, 415-416, 417-418, 419-420, 421-422, 423-424, 425-426, 427-428, 429-430, 431-432, 433-434, 435-436, 437-438, 439-440, 441-442, 443-444, 445-446, 447-448, 449-450, 451-452, 453-454, 455-456, 457-458, 459-460, 461-462, 463-464, 465-466, 467-468, 469-470, 471-472, 473-474, 475-476, 477-478, 479-480, 481-482, 483-484, 485-486, 487-488, 489-490, 491-492, 493-494, 495-496, 497-498, 499-500, 501-502, 503-504, 505-506, 507-508, 509-510, 511-512, 513-514, 515-516, 517-518, 519-520, 521-522, 523-524, 525-526, 527-528, 529-530, 531-532, 533-534, 535-536, 537-538, 539-540, 541-542, 543-544, 545-546, 547-548, or 549-550.

[0078] In some embodiments, the antibody or antigen-binding fragment thereof comprises a heavy chain variable region (HCVR) and a light chain variable region (LCVR) that comprise a HCVR/LCVR amino acid sequence pair of SEQ ID NOs: 21-22, 29-30, 31-32, 41-42, 43-44, 45-46, 49-50, 55-56, 59-60, 61-62, 79-80, 91-92, 101-102, 111-112, 115-116, 151-152, 161-162, 163-164, 165-166, 167-168, 177-178, 179-180, 183-184, 185-186, 197-198, 201-202, 203-204, 207-208, 209-210, 211-212, 213-214, 215-216, 219-220, 221-222, 239-240, 243-244, 261-262, 267-268, 273-274, 293-294, 297-298, 307-308, 323-324, 347-348, 371-372, 387-388, 389-390, 397-398, 419-420, 421-422, 433-434, 435-436, 439-440, 453-454, 459-460, 461-462, 471-472, 491-492, 493-494, 501-502, 503-504, 523-524, or 533-534.

[0079] In some embodiments, the heavy chain variable region (HCVR) and the light chain variable region (LCVR) comprise a HCVR/LCVR amino acid sequence pair of SEQ ID NOs: 31-32, 111-112, 167-168, 211-212, 389-390, or 533-534.

[0080] In some embodiments, the antibody or antigen-binding fragment thereof comprises (a) a first target binding site that specifically binds to an epitope within the S polypeptide, and (b) a second target binding site that binds to a different epitope on the S polypeptide or on a different molecule. In some embodiments, the multivalent antibody is a bivalent or bispecific antibody.

[0081] In some embodiments, the antibody or the antigen-binding fragment thereof further comprises a variant Fc constant region. In some embodiments, the antibody is a monoclonal antibody. In some embodiments, the antibody is a chimeric antibody, a humanized antibody, or a humanized monoclonal antibody. In some embodiments, the antibody is a single-chain antibody, Fab or Fab2 fragment.

[0082] In some embodiments, the antibody or the antigen-binding fragment thereof further comprises a variant Fc constant region. The antibody can be a monoclonal antibody. In some embodiments, the antibody can be a chimeric antibody, a humanized antibody, or a humanized monoclonal antibody. In some embodiments, the antibody can be a single-chain antibody, Fab or Fab2 fragment.

[0083] In some embodiments, the antibody or antigen-binding fragment thereof can be detectably labeled or conjugated to a toxin, a therapeutic agent, a polymer (e.g., polyethylene glycol (PEG)), a receptor, an enzyme, or a receptor ligand. For example, an antibody of the present invention may be coupled to a toxin (e.g., a tetanus toxin). Such antibodies may be used to treat animals, including humans, that are infected with the virus that is etiologically linked to SARS-COV-2. The toxin-coupled antibody is thought to bind to a portion of a spike protein presented on an infected cell, and then kill the infected cell.

[0084] In another example, an antibody of the present invention may be coupled to a detectable tag. Such antibodies may be used within diagnostic assays to determine if an animal, such as a human, is infected with SARS-COV-2. Examples of detectable tags include fluorescent proteins (i.e., green fluorescent protein, red fluorescent protein, yellow fluorescent protein), fluorescent markers (i.e., fluorescein isothiocyanate, rhodamine, texas red), radiolabels (i.e., 3H, 32P, 125I), enzymes (i.e., β-galactosidase, horseradish peroxidase, β-glucuronidase, alkaline phosphatase), or an affinity tag (i.e., avidin, biotin, streptavidin). Methods to couple antibodies to a detectable tag are known in the art. Harlow et al., Antibodies: A Laboratory Manual, page 319 (Cold Spring Harbor Pub. 1988).

### Fragment

[0085] In some embodiments, an antibody provided herein is an antibody fragment. Antibody fragments include, but are not limited to, Fab, Fab′, Fab′-SH, F(ab′)2, Fv, and single-chain Fv (scFv) fragments, and other fragments described below, e.g., diabodies, triabodies tetrabodies, and single-domain antibodies. For a review of certain antibody fragments, see Hudson et al., Nat. Med. 9:129-134 (2003). For a review of scFv fragments, see, e.g., Pluckthun, in The Pharmacology of Monoclonal Antibodies, vol. 113, Rosenburg and Moore eds., (Springer-Verlag, New York), pp. 269-315 (1994); see also WO 93/16185; and U.S. Pat. Nos. 5,571,894 and 5,587,458. For discussion of Fab and F(ab′) 2 fragments comprising salvage receptor binding epitope residues and having increased in vivo half-life, see U.S. Pat. No. 5,869,046.

[0086] Diabodies are antibody fragments with two antigen-binding sites that may be bivalent or bispecific. See, for example, EP 404,097; WO 1993/01161; Hudson et al., Nat. Med. 9:129-134 (2003); and Hollinger et al., Proc. Natl. Acad. Sci. USA 90:6444-6448 (1993). Triabodies and tetrabodies are also described in Hudson et al., Nat. Med. 9:129-134 (2003).

[0087] Single-domain antibodies are antibody fragments comprising all or a portion of the heavy chain variable domain or all or a portion of the light chain variable domain of an antibody. In some embodiments, a single-domain antibody is a human single-domain antibody (DOMANTIS, Inc., Waltham, Mass.; see, e.g., U.S. Pat. No. 6,248,516).

[0088] Antibody fragments can be made by various techniques, including but not limited to proteolytic digestion of an intact antibody as well as production by recombinant host cells (e.g., E. coli or phage), as described herein.

### Chimeric and Humanized Antibodies

[0089] In some embodiments, an antibody provided herein is a chimeric antibody. Certain chimeric antibodies are described, e.g., in U.S. Pat. No. 4,816,567; and Morrison et al., Proc. Natl. Acad. Sci. USA, 81:6851-6855 (1984)). In one example, a chimeric antibody comprises a non-human variable region (e.g., a variable region derived from a mouse, rat, hamster, rabbit, or non-human primate, such as a monkey) and a human constant region. In a further example, a chimeric antibody is a “class switched” antibody in which the class or subclass has been changed from that of the parent antibody. Chimeric antibodies include antigen-binding fragments thereof.

[0090] In some embodiments, a chimeric antibody is a humanized antibody. Typically, a non-human antibody is humanized to reduce immunogenicity to humans, while retaining the specificity and affinity of the parental non-human antibody. Generally, a humanized antibody comprises one or more variable domains in which HVRs, e.g., CDRs, (or portions thereof) are derived from a non-human antibody, and FRs (or portions thereof) are derived from human antibody sequences. A humanized antibody optionally will also comprise at least a portion of a human constant region. In some embodiments, some FR residues in a humanized antibody are substituted with corresponding residues from a non-human antibody (e.g., the antibody from which the HVR residues are derived), e.g., to restore or improve antibody specificity or affinity.

[0091] Humanized antibodies and methods of making them are reviewed, e.g., in Almagro and Fransson, Front. Biosci. 13:1619-1633 (2008), and are further described, e.g., in Riechmann et al., Nature 332:323-329 (1988); Queen et al., Proc. Nat'l Acad. Sci. USA 86:10029-10033 (1989); U.S. Pat. Nos. 5,821,337, 7,527,791, 6,982,321, and 7,087,409; Kashmiri et al., Methods 36:25-34 (2005) (describing specificity determining region (SDR) grafting); Padlan, Mol. Immunol. 28:489-498 (1991) (describing “resurfacing”); Dall'Acqua et al., Methods 36:43-60 (2005) (describing “FR shuffling”); and Osbourn et al., Methods 36:61-68 (2005) and Klimka et al., Br. J. Cancer, 83:252-260 (2000) (describing the “guided selection” approach to FR shuffling).

[0092] Human framework regions that may be used for humanization include but are not limited to: framework regions selected using the “best-fit” method (see, e.g., Sims et al. J. Immunol. 151:2296 (1993)); framework regions derived from the consensus sequence of human antibodies of a particular subgroup of light or heavy chain variable regions (see, e.g., Carter et al. Proc. Natl. Acad. Sci. USA, 89:4285 (1992); and Presta et al. J. Immunol., 151:2623 (1993)); human mature (somatically mutated) framework regions or human germline framework regions (see, e.g., Almagro and Fransson, Front. Biosci. 13:1619-1633 (2008)); and framework regions derived from screening FR libraries (see, e.g., Baca et al., J. Biol. Chem. 272:10678-10684 (1997) and Rosok et al., J. Biol. Chem. 271:22611-22618 (1996)).

### Human Antibodies

[0093] In some embodiments, an antibody provided herein is a human antibody. Human antibodies can be produced using various techniques known in the art or using techniques described herein. Human antibodies are described generally in van Dijk and van de Winkel, Curr. Opin. Pharmacol. 5:368-74 (2001) and Lonberg, Curr. Opin. Immunol. 20:450-459 (2008).

[0094] Human antibodies may be prepared by administering an immunogen to a transgenic animal that has been modified to produce intact human antibodies or intact antibodies with human variable regions in response to antigenic challenge. Such animals typically contain all or a portion of the human immunoglobulin loci, which replace the endogenous immunoglobulin loci, or which are present extrachromosomally or integrated randomly into the animal's chromosomes. In such transgenic mice, the endogenous immunoglobulin loci have generally been inactivated. For review of methods for obtaining human antibodies from transgenic animals, see Lonberg, Nat. Biotech. 23:1117-1125 (2005). See also, e.g., U.S. Pat. Nos. 6,075,181 and 6,150,584 describing XENOMOUSE technology; U.S. Pat. No. 5,770,429 describing HUMAB technology; U.S. Pat. No. 7,041,870 describing K-M MOUSE technology, and U.S. Patent Application Publication No. US 2007/0061900, describing VELOCIMOUSE technology). Human variable regions from intact antibodies generated by such animals may be further modified, e.g., by combining with a different human constant region.

[0095] Human antibodies can also be made by hybridoma-based methods. Human myeloma and mouse-human heteromyeloma cell lines for the production of human monoclonal antibodies have been described. (See, e.g., Kozbor J. Immunol., 133:3001 (1984); Brodeur et al., Monoclonal Antibody Production Techniques and Applications, pp. 51-63 (Marcel Dekker, Inc., New York, 1987); and Boerner et al., J. Immunol., 147:86 (1991).) Human antibodies generated via human B-cell hybridoma technology are also described in Li et al., Proc. Natl. Acad. Sci. USA, 103:3557-3562 (2006). Additional methods include those described, for example, in U.S. Pat. No. 7,189,826 (describing production of monoclonal human IgM antibodies from hybridoma cell lines) and Ni, Xiandai Mianyixue, 26 (4): 265-268 (2006) (describing human-human hybridomas). Human hybridoma technology (Trioma technology) is also described in Vollmers and Brandlein, Histology and Histopathology, 20 (3): 927-937 (2005) and Vollmers and Brandlein, Methods and Findings in Experimental and Clinical Pharmacology, 27 (3): 185-91 (2005).

[0096] Human antibodies may also be generated by isolating Fv clone variable domain sequences selected from human-derived phage display libraries. Such variable domain sequences may then be combined with a desired human constant domain. Techniques for selecting human antibodies from antibody libraries are described below.

[0097] Antibodies of the invention may be isolated by screening combinatorial libraries for antibodies with the desired activity or activities. For example, a variety of methods are known in the art for generating phage display libraries and screening such libraries for antibodies possessing the desired binding characteristics. Such methods are reviewed, e.g., in Hoogenboom et al., in Methods in Molecular Biology 178:1-37 (O'Brien et al., ed., Human Press, Totowa, N.J., 2001) and further described, e.g., in the McCafferty et al., Nature 348:552-554; Clackson et al., Nature 352:624-628 (1991); Marks et al., J. Mol. Biol. 222:581-597 (1992); Marks and Bradbury, in Methods in Molecular Biology 248:161-175 (Lo, ed., Human Press, Totowa, N.J., 2003); Sidhu et al., J. Mol. Biol. 338 (2): 299-310 (2004); Lee et al., J. Mol. Biol. 340 (5): 1073-1093 (2004); Fellouse, Proc. Natl. Acad. Sci. USA 101 (34): 12467-12472 (2004); and Lee et al., J. Immunol. Methods 284 (1-2): 119-132 (2004).

[0098] In certain phage display methods, repertoires of VH and VL genes are separately cloned by polymerase chain reaction (PCR) and recombined randomly in phage libraries, which can then be screened for antigen-binding phage as described in Winter et al., Ann. Rev. Immunol., 12:433-455 (1994). Phage typically displays antibody fragments, either as scFv fragments or as Fab fragments. Libraries from immunized sources provide high-affinity antibodies to the immunogen without the requirement of constructing hybridomas. Alternatively, the naïve repertoire can be cloned (e.g., from human) to provide a single source of antibodies to a wide range of non-self and also self-antigens without any immunization as described by Griffiths et al., EMBO J, 12:725-734 (1993). Finally, naïve libraries can also be made synthetically by cloning unrearranged V-gene segments from stem cells and using PCR primers containing random sequences to encode the highly variable CDR3 regions and to accomplish rearrangement in vitro, as described by Hoogenboom and Winter, J. Mol. Biol., 227:381-388 (1992). Patent publications describing human antibody phage libraries include, for example, U.S. Pat. No. 5,750,373, and US Patent Publication Nos. 2005/0079574, 2005/0119455, 2005/0266000, 2007/0117126, 2007/0160598, 2007/0237764, 2007/0292936, and 2009/0002360. Antibodies or antibody fragments isolated from human antibody libraries are considered human antibodies or human antibody fragments herein.

### Variants

[0099] In some embodiments, amino acid sequence variants of the antibodies provided herein are contemplated. For example, it may be desirable to improve the binding affinity and/or other biological properties of the antibody. Amino acid sequence variants of an antibody may be prepared by introducing appropriate modifications into the nucleotide sequence encoding the antibody, or by peptide synthesis. Such modifications include, for example, deletions from, and/or insertions into and/or substitutions of residues within the amino acid sequences of the antibody. Any combination of deletion, insertion, and substitution can be made to arrive at the final construct, provided that the final construct possesses the desired characteristics, e.g., antigen binding.

### Substitution, Insertion, and Deletion Variants

[0100] In some embodiments, antibody variants having one or more amino acid substitutions are provided. Sites of interest for substitutional mutagenesis include the HVRs and FRs. Conservative substitutions are defined herein. Amino acid substitutions may be introduced into an antibody of interest and the products screened for a desired activity, e.g., retained/improved antigen binding, decreased immunogenicity, or improved antibody-dependent cell-mediated cytotoxicity (ADCC) and complement-dependent cytotoxicity (CDC).

[0101] Accordingly, an antibody of the invention can comprise one or more conservative modifications of the CDRs, heavy chain variable region, or light variable regions described herein. A conservative modification or functional equivalent of a peptide, polypeptide, or protein disclosed in this invention refers to a polypeptide derivative of the peptide, polypeptide, or protein, e.g., a protein having one or more point mutations, insertions, deletions, truncations, a fusion protein, or a combination thereof. It substantially retains the activity to of the parent peptide, polypeptide, or protein (such as those disclosed in this invention). In general, a conservative modification or functional equivalent is at least 60% (e.g., any number between 60% and 100%, inclusive, e.g., 60%, 70%, 75%, 80%, 85%, 90%, 95%, 96%, 97%, 98%, and 99%) identical to a parent. Accordingly, within the scope of this invention are heavy chain variable region or light variable regions having one or more point mutations, insertions, deletions, truncations, a fusion protein, or a combination thereof, as well as antibodies having the variant regions.

[0102] As used herein, the percent homology between two amino acid sequences is equivalent to the percent identity between the two sequences. The percent identity between the two sequences is a function of the number of identical positions shared by the sequences (i.e., % homology=# of identical positions/total # of positions×100), taking into account the number of gaps, and the length of each gap, which need to be introduced for optimal alignment of the two sequences. The comparison of sequences and determination of percent identity between two sequences can be accomplished using a mathematical algorithm, as described in the non-limiting examples below.

[0103] The percent identity between two amino acid sequences can be determined using the algorithm of E. Meyers and W. Miller (Comput. Appl. Biosci., 4:11-17 (1988)) which has been incorporated into the ALIGN program (version 2.0), using a PAM120 weight residue table, a gap length penalty of 12 and a gap penalty of 4. In addition, the percent identity between two amino acid sequences can be determined using the Needleman and Wunsch (J. Mol. Biol. 48:444-453 (1970)) algorithm, which has been incorporated into the GAP program in the GCG software package (available at www.gcg.com), using either a Blossum 62 matrix or a PAM250 matrix, and a gap weight of 16, 14, 12, 10, 8, 6, or 4 and a length weight of 1, 2, 3, 4, 5, or 6.

[0104] Additionally or alternatively, the protein sequences of the present invention can further be used as a “query sequence” to perform a search against public databases to, for example, identify related sequences. Such searches can be performed using the XBLAST program (version 2.0) of Altschul, et al. (1990) J. Mol. Biol. 215:403-10. BLAST protein searches can be performed with the XBLAST program, score=50, wordlength=3 to obtain amino acid sequences homologous to the antibody molecules of the invention. To obtain gapped alignments for comparison purposes, Gapped BLAST can be utilized as described in Altschul et al., (1997) Nucleic Acids Res. 25 (17): 3389-3402. When utilizing BLAST and Gapped BLAST programs, the default parameters of the respective programs (e.g., XBLAST and NBLAST) can be used. (See www.ncbi.nlm.nih.gov).

[0105] As used herein, the term “conservative modifications” refers to amino acid modifications that do not significantly affect or alter the binding characteristics of the antibody containing the amino acid sequence. Such conservative modifications include amino acid substitutions, additions and deletions. Modifications can be introduced into an antibody of the invention by standard techniques known in the art, such as site-directed mutagenesis and PCR-mediated mutagenesis. Conservative amino acid substitutions are ones in which the amino acid residue is replaced with an amino acid residue having a similar side chain. Families of amino acid residues having similar side chains have been defined in the art. These families include: (i) amino acids with basic side chains (e.g., lysine, arginine, histidine), (ii) acidic side chains (e.g., aspartic acid, glutamic acid), (iii) uncharged polar side chains (e.g., glycine, asparagine, glutamine, serine, threonine, tyrosine, cysteine, tryptophan), (iv) nonpolar side chains (e.g., alanine, valine, leucine, isoleucine, proline, phenylalanine, methionine), (v) beta-branched side chains (e.g., threonine, valine, isoleucine), and (vi) aromatic side chains (e.g., tyrosine, phenylalanine, tryptophan, histidine).

[0106] Non-conservative substitutions will entail exchanging a member of one of these classes for another class.

[0107] An exemplary substitutional variant is an affinity matured antibody, which may be conveniently generated, e.g., using phage display-based affinity maturation techniques such as those described in, e.g., Hoogenboom et al., in Methods in Molecular Biology 178:1-37 (O'Brien et al., ed., Human Press, Totowa, N.J., (2001). Amino acid sequence insertions include amino- and/or carboxyl-terminal fusions ranging in length from one residue to polypeptides containing a hundred or more residues, as well as intrasequence insertions of single or multiple amino acid residues. Examples of terminal insertions include an antibody with an N-terminal methionyl residue. Other insertional variants of the antibody molecule include the fusion to the N- or C-terminus of the antibody to an enzyme (e.g., for ADEPT) or a polypeptide which increases the serum half-life of the antibody.

### Glycosylation Variants

[0108] In some embodiments, an antibody provided herein is altered to increase or decrease the extent to which the antibody is glycosylated. Addition or deletion of glycosylation sites to an antibody may be conveniently accomplished by altering the amino acid sequence such that one or more glycosylation sites are created or removed.

[0109] For example, an aglycoslated antibody can be made (i.e., the antibody lacks glycosylation). Glycosylation can be altered to, for example, increase the affinity of the antibody for antigen. Such carbohydrate modifications can be accomplished by, for example, altering one or more sites of glycosylation within the antibody sequence. For example, one or more amino acid substitutions can be made that result in elimination of one or more variable region framework glycosylation sites to thereby eliminate glycosylation at that site. Such aglycosylation may increase the affinity of the antibody for antigen. Such an approach is described in further detail in U.S. Pat. Nos. 5,714,350 and 6,350,861 by Co et al.

[0110] Glycosylation of the constant region on N297 may be prevented by mutating the N297 residue to another residue, e.g., N297A, and/or by mutating an adjacent amino acid, e.g., 298 to thereby reduce glycosylation on N297.

[0111] Additionally or alternatively, an antibody can be made that has an altered type of glycosylation, such as a hypofucosylated antibody having reduced amounts of fucosyl residues or an antibody having increased bisecting GlcNac structures. Such altered glycosylation patterns have been demonstrated to increase the ADCC ability of antibodies. Such carbohydrate modifications can be accomplished by, for example, expressing the antibody in a host cell with altered glycosylation machinery. Cells with altered glycosylation machinery have been described in the art and can be used as host cells in which to express recombinant antibodies described herein to thereby produce an antibody with altered glycosylation. For example, EP 1,176,195 by Hanai et al. describes a cell line with a functionally disrupted FUT8 gene, which encodes a fucosyltransferase, such that antibodies expressed in such a cell line exhibit hypofucosylation. PCT Publication WO 03/035835 by Presta describes a variant Chinese Hamster Ovary cell line, Led 3 cells, with reduced ability to attach fucose to Asn (297)-linked carbohydrates, also resulting in hypofucosylation of antibodies expressed in that host cell (see also Shields, R. L. et al. (2002) J. Biol. Chem. 277:26733-26740). PCT Publication WO 99/54342 by Umana et al. describes cell lines engineered to express glycoprotein-modifying glycosyltransferases (e.g., beta (1,4)-N-acetylglucosaminyltransferase III (GnTIII)) such that antibodies expressed in the engineered cell lines exhibit increased bisecting GlcNac structures which result in increased ADCC activity of the antibodies (see also Umana et al. (1999) Nat. Biotech. 17:176-180).

### Fc Region Variants

[0112] The variable regions of the antibody described herein can be linked (e.g., covalently linked or fused) to an Fc, e.g., an IgG1, IgG2, IgG3 or IgG4 Fc, which may be of any allotype or isoallotype, e.g., for IgG1: Glm, Glm1 (a), Glm2 (x), Glm3 (f), Glm17 (z); for IgG2: G2m, G2m23 (n); for IgG3: G3m, G3m21 (g1), G3m28 (g5), G3 ml 1 (b0), G3m5 (b1), G3ml3 (b3), G3ml4 (b4), G3ml0 (b5), G3ml5 (s), G3ml6 (t), G3m6 (c3), G3m24 (c5), G3m26 (u), G3m27 (v); and for K: Km, Km1, Km2, Km3 (see, e.g., Jefferies et al. (2009) mAbs 1:1). In some embodiments, the antibodies variable regions described herein are linked to an Fc that binds to one or more activating Fc receptors (FcγI, FcγIIa, or FcγIIIa), and thereby stimulate ADCC and may cause T cell depletion. In some embodiments, the antibody variable regions described herein are linked to an Fc that causes depletion.

[0113] In some embodiments, the antibody variable regions described herein may be linked to an Fc comprising one or more modifications, typically to alter one or more functional properties of the antibody, such as serum half-life, complement fixation, Fc receptor binding, and/or antigen-dependent cellular cytotoxicity. Furthermore, an antibody described herein may be chemically modified (e.g., one or more chemical moieties can be attached to the antibody) or be modified to alter its glycosylation, to alter one or more functional properties of the antibody. The numbering of residues in the Fc region is that of the EU index of Kabat.

[0114] The Fc region encompasses domains derived from the constant region of an immunoglobulin, preferably a human immunoglobulin, including a fragment, analog, variant, mutant, or derivative of the constant region. Suitable immunoglobulins include IgG1, IgG2, IgG3, IgG4, and other classes such as IgA, IgD, IgE, and IgM. The constant region of an immunoglobulin is defined as a naturally-occurring or synthetically-produced polypeptide homologous to the immunoglobulin C-terminal region, and can include a CH1 domain, a hinge, a CH2 domain, a CH3 domain, or a CH4 domain, separately or in combination. In some embodiments, an antibody of this invention has an Fc region other than that of a wild type IgA1. The antibody can have an Fc region from that of IgG (e.g., IgG1, IgG2, IgG3, and IgG4) or other classes such as IgA2, IgD, IgE, and IgM. The Fc can be a mutant form of IgA1.

[0115] The constant region of an immunoglobulin is responsible for many important antibody functions, including Fc receptor (FcR) binding and complement fixation. There are five major classes of heavy chain constant region, classified as IgA, IgG, IgD, IgE, IgM, each with characteristic effector functions designated by isotype. For example, IgG is separated into four subclasses known as IgG1, IgG2, IgG3, and IgG4.

[0116] Ig molecules interact with multiple classes of cellular receptors. For example, IgG molecules interact with three classes of Fcγ receptors (FcγR) specific for the IgG class of antibody, namely FcγRI, FcγRII, and FcγRIIL. The important sequences for the binding of IgG to the FcγR receptors have been reported to be located in the CH2 and CH3 domains. The serum half-life of an antibody is influenced by the ability of that antibody to bind to an FcR.

[0117] In some embodiments, the Fc region is a variant Fc region, e.g., an Fc sequence that has been modified (e.g., by amino acid substitution, deletion and/or insertion) relative to a parent Fc sequence (e.g., an unmodified Fc polypeptide that is subsequently modified to generate a variant), to provide desirable structural features and/or biological activity. For example, one may make modifications in the Fc region in order to generate an Fc variant that (a) has increased or decreased ADCC, (b) increased or decreased CDC, (c) has increased or decreased affinity for Clq and/or (d) has increased or decreased affinity for an Fc receptor relative to the parent Fc. Such Fc region variants will generally comprise at least one amino acid modification in the Fc region. Combining amino acid modifications is thought to be particularly desirable. For example, the variant Fc region may include two, three, four, five, etc., substitutions therein, e.g., of the specific Fc region positions identified herein.

[0118] A variant Fc region may also comprise a sequence alteration wherein amino acids involved in disulfide bond formation are removed or replaced with other amino acids. Such removal may avoid reaction with other cysteine-containing proteins present in the host cell used to produce the antibodies described herein. Even when cysteine residues are removed, single chain Fc domains can still form a dimeric Fc domain that is held together non-covalently. In other embodiments, the Fc region may be modified to make it more compatible with a selected host cell. For example, one may remove the PA sequence near the N-terminus of a typical native Fc region, which may be recognized by a digestive enzyme in E. coli, such as proline iminopeptidase. In other embodiments, one or more glycosylation sites within the Fc domain may be removed. Residues that are typically glycosylated (e.g., asparagine) may confer cytolytic response. Such residues may be deleted or substituted with unglycosylated residues (e.g., alanine). In other embodiments, sites involved in interaction with complement, such as the Clq binding site, may be removed from the Fc region. For example, one may delete or substitute the EKK sequence of human IgG1. In some embodiments, sites that affect binding to Fc receptors may be removed, preferably sites other than salvage receptor binding sites. In other embodiments, an Fc region may be modified to remove an ADCC site. ADCC sites are known in the art; see, for example, Molec. Immunol. 29 (5): 633-9 (1992) with regard to ADCC sites in IgG1. Specific examples of variant Fc domains are disclosed, for example, in WO 97/34631 and WO 96/32478.

[0119] In one embodiment, the hinge region of Fc is modified such that the number of cysteine residues in the hinge region is altered, e.g., increased or decreased. This approach is described further in U.S. Pat. No. 5,677,425 by Bodmer et al. The number of cysteine residues in the hinge region of Fc is altered to, for example, facilitate assembly of the light and heavy chains or to increase or decrease the stability of the antibody. In one embodiment, the Fc hinge region of an antibody is mutated to decrease the biological half-life of the antibody. More specifically, one or more amino acid mutations are introduced into the CH2-CH3 domain interface region of the Fc-hinge fragment such that the antibody has impaired Staphylococcal protein A (SpA) binding relative to native Fc-hinge domain SpA binding. This approach is described in further detail in U.S. Pat. No. 6,165,745 by Ward et al.

[0120] In yet other embodiments, the Fc region is altered by replacing at least one amino acid residue with a different amino acid residue to alter the effector function(s) of the antibody. For example, one or more amino acids selected from amino acid residues 234, 235, 236, 237, 297, 318, 320, and 322 can be replaced with a different amino acid residue such that the antibody has an altered affinity for an effector ligand but retains the antigen-binding ability of the parent antibody. The effector ligand to which affinity is altered can be, for example, an Fc receptor or the CI component of complement. This approach is described in further detail in U.S. Pat. Nos. 5,624,821 and 5,648,260, both by Winter et al.

[0121] In another example, one or more amino acids selected from amino acid residues 329, 331, and 322 can be replaced with a different amino acid residue such that the antibody has altered Clq binding and/or reduced or abolished CDC. This approach is described in further detail in U.S. Pat. No. 6,194,551 by Idusogie et al.

[0122] In another example, one or more amino acid residues within amino acid positions 231 and 239 are altered to thereby alter the ability of the antibody to fix complement. This approach is described further in PCT Publication WO 94/29351 by Bodmer et al.

[0123] In yet another example, the Fc region may be modified to increase ADCC and/or to increase the affinity for an Fcγ receptor by modifying one or more amino acids at the following positions: 234, 235, 236, 238, 239, 240, 241, 243, 244, 245, 247, 248, 249, 252, 254, 255, 256, 258, 262, 263, 264, 265, 267, 268, 269, 270, 272, 276, 278, 280, 283, 285, 286, 289, 290, 292, 293, 294, 295, 296, 298, 299, 301, 303, 305, 307, 309, 312, 313, 315, 320, 322, 324, 325, 326, 327, 329, 330, 331, 332, 333, 334, 335, 337, 338, 340, 360, 373, 376, 378, 382, 388, 389, 398, 414, 416, 419, 430, 433, 434, 435, 436, 437, 438 or 439. Exemplary substitutions include 236A, 239D, 239E, 268D, 267E, 268E, 268F, 324T, 332D, and 332E. Exemplary variants include 239D/332E, 236A/332E, 236A/239D/332E, 268F/324T, 267E/268F, 267E/324T, and 267E/268F7324T. Other modifications for enhancing FcγR and complement interactions include but are not limited to substitutions 298A, 333A, 334A, 326A, 2471, 339D, 339Q, 280H, 290S, 298D, 298V, 243L, 292P, 300L, 396L, 305I, and 396L. These and other modifications are reviewed in Strohl, 2009, Current

### Opinion in Biotechnology 20:685-691.

[0124] Fc modifications that increase binding to an Fcγ receptor include amino acid modifications at any one or more of amino acid positions 238, 239, 248, 249, 252, 254, 255, 256, 258, 265, 267, 268, 269, 270, 272, 279, 280, 283, 285, 298, 289, 290, 292, 293, 294, 295, 296, 298, 301, 303, 305, 307, 312, 315, 324, 327, 329, 330, 335, 337, 3338, 340, 360, 373, 376, 379, 382, 388, 389, 398, 414, 416, 419, 430, 434, 435, 437, 438 or 439 of the Fc region, wherein the numbering of the residues in the Fc region is that of the EU index as in abat (WO00/42072).

[0125] Other Fc modifications that can be made to Fcs are those for reducing or ablating binding to FcγR and/or complement proteins, thereby reducing or ablating Fc-mediated effector functions such as ADCC, antibody-dependent cellular phagocytosis (ADCP), and CDC. Exemplary modifications include but are not limited to substitutions, insertions, and deletions at positions 234, 235, 236, 237, 267, 269, 325, and 328, wherein numbering is according to the EU index. Exemplary substitutions include but are not limited to 234G, 235G, 236R, 237K, 267R, 269R, 325L, and 328R, wherein numbering is according to the EU index. An Fc variant may comprise 236R/328R. Other modifications for reducing FcγR and complement interactions include substitutions 297A, 234A, 235A, 237A, 318A, 228P, 236E, 268Q, 309L, 330S, 331S, 220S, 226S, 229S, 238S, 233P, and 234V, as well as removal of the glycosylation at position 297 by mutational or enzymatic means or by production in organisms such as bacteria that do not glycosylate proteins. These and other modifications are reviewed in Strohl, 2009, Current Opinion in Biotechnology 20:685-691.

[0126] Optionally, the Fc region may comprise a non-naturally occurring amino acid residue at additional and/or alternative positions known to one skilled in the art (see, e.g., U.S. Pat. Nos. 5,624,821; 6,277,375; 6,737,056; 6,194,551; 7,317,091; 8,101,720; WO00/42072; WO01/58957; WO02/06919; WO04/016750; WO04/029207; WO04/035752; WO04/074455; WO04/099249; WO04/063351; WO05/070963; WO05/040217, WO05/092925 and WO06/020114).

[0127] Fc variants that enhance affinity for an inhibitory receptor FcγRIIb may also be used. Such variants may provide an Fc fusion protein with immune-modulatory activities related to FcγRIIb cells, including, for example, B cells and monocytes. In one embodiment, the Fc variants provide selectively enhanced affinity to FcγRIIb relative to one or more activating receptors. Modifications for altering binding to FcγRIIb include one or more modifications at a position selected from the group consisting of 234, 235, 236, 237, 239, 266, 267, 268, 325, 326, 327, 328, and 332, according to the EU index. Exemplary substitutions for enhancing FcγRIIb affinity include but are not limited to 234D, 234E, 234F, 234W, 235D, 235F, 235R, 235Y, 236D, 236N, 237D, 237N, 239D, 239E, 266M, 267D, 267E, 268D, 268E, 327D, 327E, 328F, 328W, 328Y, and 332E. Exemplary substitutions include 235Y, 236D, 239D, 266M, 267E, 268D, 268E, 328F, 328W, and 328Y. Other Fc variants for enhancing binding to FcγRllb include 235Y/267E, 236D/267E, 239D/268D, 239D/267E, 267E/268D, 267E/268E, and 267E/328F.

[0128] The affinities and binding properties of an Fc region for its ligand may be determined by a variety of in vitro assay methods (biochemical or immunological based assays) known in the art, including but not limited to equilibrium methods (e.g., ELISA, or radioimmunoassay), or kinetics (e.g., BIACORE analysis), and other methods such as indirect binding assays, competitive inhibition assays, fluorescence resonance energy transfer (FRET), gel electrophoresis and chromatography (e.g., gel filtration). These and other methods may utilize a label on one or more of the components being examined and/or employ a variety of detection methods, including but not limited to chromogenic, fluorescent, luminescent, or isotopic labels. A detailed description of binding affinities and kinetics can be found in Paul, W. E., ed., Fundamental Immunology, 4th Ed., Lippincott-Raven, Philadelphia (1999), which focuses on antibody-immunogen interactions.

[0129] In some embodiments, the antibody is modified to increase its biological half-life. Various approaches are possible. For example, this may be done by increasing the binding affinity of the Fc region for FcRn. For example, one or more of the following residues can be mutated: 252, 254, 256, 433, 435, 436, as described in U.S. Pat. No. 6,277,375. Specific exemplary substitutions include one or more of the following: T252L, T254S, and/or T256F. Alternatively, to increase the biological half-life, the antibody can be altered within the CH1 or CL region to contain a salvage receptor binding epitope taken from two loops of a CH2 domain of an Fc region of an IgG, as described in U.S. Pat. Nos. 5,869,046 and 6,121,022 by Presta et al. Other exemplary variants that increase binding to FcRn and/or improve pharmacokinetic properties include substitutions at positions 259, 308, 428, and 434, including for example 259I, 308F, 428L, 428M, 434S, 434H, 434F, 434Y, and 434M. Other variants that increase Fc binding to FcRn include: 250E, 250Q, 428L, 428F, 250Q/428L (Hinton et al,, 2004, J. Biol. Chem. 279 (8): 6213-6216, Hinton et al. 2006 Journal of Immunology 176:346-356), 256A, 272A, 286A, 305A, 307A, 307Q, 311A, 312A, 376A, 378Q, 380A, 382A, 434A (Shields et al, Journal of Biological Chemistry, 2001, 276 (9): 6591-6604), 252F, 252T, 252Y, 252W, 254T, 256S, 256R, 256Q, 256E, 256D, 256T, 309P, 311S, 433R, 433S, 433I, 433P, 433Q, 434H, 434F, 434Y, 252Y/254T/256E, 433K/434F/436H, 308T/309P/311S (Dall Acqua et al. Journal of Immunology, 2002, 169:5171-5180, Dall'Acqua et al., 2006, Journal of Biological Chemistry 281:23514-23524). Other modifications for modulating FcRn binding are described in Yeung et al., 2010, J Immunol, 182:7663-7671. In some embodiments, hybrid IgG isotypes with particular biological characteristics may be used. For example, an IgG1/IgG3 hybrid variant may be constructed by substituting IgG 1 positions in the CH2 and/or CH3 region with the amino acids from IgG3 at positions where the two isotypes differ. Thus a hybrid variant IgG antibody may be constructed that comprises one or more substitutions, e.g., 274Q, 276K, 300F, 339T, 356E, 358M, 384S, 392N, 397M, 422I, 435R, and 436F. In other embodiments described herein, an IgG1/IgG2 hybrid variant may be constructed by substituting IgG2 positions in the CH2 and/or CH3 region with amino acids from IgG1 at positions where the two isotypes differ. Thus a hybrid variant IgG antibody may be constructed chat comprises one or more substitutions, e.g., one or more of the following amino acid substitutions: 233E, 234L, 235L, 236G (referring to an insertion of a glycine at position 236), and 321 h.

[0130] Moreover, the binding sites on human IgG1 for FcγRI, FcγRII, FcγRIII, and FcRn have been mapped, and variants with improved binding have been described (see Shields, R. L. et al. (2001) J. Biol. Chem. 276:6591-6604). Specific mutations at positions 256, 290, 298, 333, 334, and 339 were shown to improve binding to FcγRIII. Additionally, the following combination mutants were shown to improve FcγRIII binding: T256A/S298A, S298A/E333A, S298A/K224A, and S298A/E333A/K334A, which has been shown to exhibit enhanced FcγRIIIa binding and ADCC activity (Shields et al., 2001). Other IgG1 variants with strongly enhanced binding to FcγRIIIa have been identified, including variants with S239D/1332E and S239D/1332E/A330L mutations which showed the greatest increase in affinity for FcγRIIIa, a decrease in FcγRIIb binding, and strong cytotoxic activity in cynomolgus monkeys (Lazar et al., 2006). Introduction of the triple mutations into antibodies such as alemtuzumab (CD52-specific), trastuzumab (HER2/neu-specific), rituximab (CD20-specific), and cetuximab (EGFR-specific) translated into greatly enhanced ADCC activity in vitro, and the S239D/1332E variant showed an enhanced capacity to deplete B cells in monkeys (Lazar et al., 2006). In addition, IgG1 mutants containing L235V, F243L, R292P, Y300L and P396L mutations which exhibited enhanced binding to FcγRIIIa and concomitantly enhanced ADCC activity in transgenic mice expressing human FcγRIIIa in models of B cell malignancies and breast cancer have been identified (Stavenhagen et al., 2007; Nordstrom et al., 2011). Other Fc mutants that may be used include S298A/E333A/L334A, S239D/1332E, S239D/1332E/A330L, L235V/F243L/R292P/Y300L/P396L, and M428L/N434S.

[0131] In some embodiments, an Fc is chosen that has reduced binding to FcγRs. An exemplary Fc, e.g., IgG1 Fc, with reduced FcγR binding, comprises the following three amino acid substitutions: L234A, L235E, and G237A.

[0132] In some embodiments, an Fc is chosen that has reduced complement fixation. An exemplary Fc, e.g., IgG1 Fc, with reduced complement fixation, has the following two amino acid substitutions: A330S and P331S.

[0133] In some embodiments, an Fc is chosen that has essentially no effector function, i.e., it has reduced binding to FcγRs and reduced complement fixation. An exemplary Fc, e.g., IgG1 Fc, that is effectorless, comprises the following five mutations: L234A, L235E, G237A, A330S, and P331S.

[0134] When using an IgG4 constant domain, it is usually preferable to include the substitution S228P, which mimics the hinge sequence in IgG1 and thereby stabilizes IgG4 molecules.

### Multivalent Antibodies

[0135] In one embodiment, the antibodies of the invention may be monovalent or multivalent (e.g., bivalent, trivalent, etc.). As used herein, the term “valency” refers to the number of potential target binding sites associated with an antibody. Each target binding site specifically binds one target molecule or specific position or locus on a target molecule. When an antibody is monovalent, each binding site of the molecule will specifically bind to a single antigen position or epitope. When an antibody comprises more than one target binding site (multivalent), each target binding site may specifically bind the same or different molecules (e.g., may bind to different ligands or different antigens, or different epitopes or positions on the same antigen). See, for example, U.S.P.N. 2009/0130105. In each case, at least one of the binding sites will comprise an epitope, motif or domain associated with a DLL3 isoform.

[0136] In one embodiment, the antibodies are bispecific antibodies in which the two chains have different specificities, as described in Millstein et al., 1983, Nature, 305:537-539. Other embodiments include antibodies with additional specificities, such as trispecific antibodies. Other more sophisticated compatible multispecific constructs and methods of their fabrication are set forth in U.S.P.N. 2009/0155255, as well as WO 94/04690; Suresh et al., 1986, Methods in Enzymology, 121:210; and WO96/27011.

[0137] As stated above, multivalent antibodies may immunospecifically bind to different epitopes of the desired target molecule or may immunospecifically bind to both the target molecule as well as a heterologous epitope, such as a heterologous polypeptide or solid support material. In some embodiments, the multivalent antibodies may include bispecific antibodies or trispecific antibodies. Bispecific antibodies also include cross-linked or “heteroconjugate” antibodies. For example, one of the antibodies in the heteroconjugate can be coupled to avidin, the other to biotin. Such antibodies have, for example, been proposed to target immune system cells to unwanted cells (U.S. Pat. No. 4,676,980), and for treatment of HIV infection (WO 91/00360, WO 92/200373, and EP 03089). Heteroconjugate antibodies may be made using any convenient cross-linking methods. Suitable cross-linking agents are well known in the art and are disclosed in U.S. Pat. No. 4,676,980, along with a number of cross-linking techniques.

[0138] In some embodiments, antibody variable domains with the desired binding specificities (antibody-antigen combining sites) are fused to immunoglobulin constant domain sequences, such as an immunoglobulin heavy chain constant domain comprising at least part of the hinge, CH2, and/or CH3 regions, using methods well known to those of ordinary skill in the art.

### Antibody Derivatives

[0139] An antibody provided herein may be further modified to contain additional nonproteinaceous moieties that are known in the art and readily available. The moieties suitable for derivatization of the antibody include but are not limited to water-soluble polymers.

[0140] Non-limiting examples of water-soluble polymers include, but are not limited to, PEG, copolymers of ethylene glycol/propylene glycol, carboxymethylcellulose, dextran, polyvinyl alcohol, polyvinyl pyrrolidone, poly-1,3-dioxolane, poly-1,3,6-trioxane, ethylene/maleic anhydride copolymer, polyaminoacids (either homopolymers or random copolymers), and dextran or poly(n-vinyl pyrrolidone) polyethylene glycol, propropylene glycol homopolymers, polypropylene oxide/ethylene oxide co-polymers, polyoxyethylated polyols (e.g., glycerol), polyvinyl alcohol, and mixtures thereof. Polyethylene glycol propionaldehyde may have advantages in manufacturing due to its stability in water. The polymer may be of any molecular weight and may be branched or unbranched. The number of polymers attached to the antibody may vary, and if more than one polymer is attached, they can be the same or different molecules. In general, the number and/or type of polymers used for derivatization can be determined based on considerations including, but not limited to, the particular properties or functions of the antibody to be improved, whether the antibody derivative will be used in a therapy under defined conditions, etc.

[0141] In another embodiment, conjugates of an antibody and nonproteinaceous moiety that may be selectively heated by exposure to radiation are provided. In one embodiment, the nonproteinaceous moiety is a carbon nanotube (Kam et al., Proc. Natl. Acad. Sci. USA 102:11600-11605 (2005)). The radiation may be of any wavelength and includes, but is not limited to, wavelengths that do not harm ordinary cells, but which heat the nonproteinaceous moiety to a temperature at which cells proximal to the antibody-nonproteinaceous moiety are killed.

[0142] Another modification of the antibodies described herein is pegylation. An antibody can be pegylated to, for example, increase the biological (e.g., serum) half-life of the antibody. To pegylate an antibody, the antibody, or fragment thereof, typically is reacted with PEG, such as a reactive ester or aldehyde derivative of PEG, under conditions in which one or more PEG groups become attached to the antibody or antibody fragment. Preferably, the pegylation is carried out via an acylation reaction or an alkylation reaction with a reactive PEG molecule (or an analogous reactive water-soluble polymer). As used herein, the term “polyethylene glycol” is intended to encompass any of the forms of PEG that have been used to derivatize other proteins, such as mono(C1-C10)alkoxy- or aryloxy-polyethylene glycol or polyethylene glycol-maleimide. In some embodiments, the antibody to be pegylated is an aglycosylated antibody. Methods for pegylating proteins are known in the art and can be applied to the antibodies described herein. See, for example, EP 0 154 316 by Nishimura et al. and EP0401384 by Ishikawa et al.

[0143] The present invention also encompasses a human monoclonal antibody described herein conjugated to a therapeutic agent, a polymer, a detectable label, or enzyme. In one embodiment, the therapeutic agent is a cytotoxic agent. In one embodiment, the polymer is PEG.

### Nucleic Acids, Expression Cassettes, and Vectors

[0144] The present invention provides isolated nucleic acid segments that encode the polypeptides, peptide fragments, and coupled proteins of the invention. The nucleic acid segments of the invention also include segments that encode for the same amino acids due to the degeneracy of the genetic code. For example, the amino acid threonine is encoded by ACU, ACC, ACA, and ACG and is therefore degenerate. It is intended that the invention includes all variations of the polynucleotide segments that encode for the same amino acids. Such mutations are known in the art (Watson et al., Molecular Biology of the Gene, Benjamin Cummings 1987). Mutations also include alteration of a nucleic acid segment to encode for conservative amino acid changes, for example, the substitution of leucine for isoleucine and so forth. Such mutations are also known in the art. Thus, the genes and nucleotide sequences of the invention include both the naturally occurring sequences as well as mutant forms.

[0145] The nucleic acid segments of the invention may be contained within a vector. A vector may include, but is not limited to, any plasmid, phagemid, F-factor, virus, cosmid, or phage in a double- or single-stranded linear or circular form which may or may not be self transmissible or mobilizable. The vector can also transform a prokaryotic or eukaryotic host either by integration into the cellular genome or exist extra-chromosomally (e.g., autonomous replicating plasmid with an origin of replication).

[0146] Preferably the nucleic acid segment in the vector is under the control of, and operably linked to, an appropriate promoter or other regulatory elements for transcription in vitro or in a host cell, such as a eukaryotic cell, or a microbe, e.g., bacteria. The vector may be a shuttle vector that functions in multiple hosts. The vector may also be a cloning vector that typically contains one or a small number of restriction endonuclease recognition sites at which foreign DNA sequences can be inserted in a determinable fashion. Such insertion can occur without loss of essential biological function of the cloning vector. A cloning vector may also contain a marker gene that is suitable for use in the identification and selection of cells transformed with the cloning vector. Examples of marker genes are tetracycline resistance or ampicillin resistance. Many cloning vectors are commercially available (Stratagene, New England Biolabs, Clonetech).

[0147] The nucleic acid segments of the invention may also be inserted into an expression vector. Typically, an expression vector contains prokaryotic DNA elements coding for a bacterial replication origin and an antibiotic resistance gene to provide for the amplification and selection of the expression vector in a bacterial host; regulatory elements that control initiation of transcription such as a promoter; and DNA elements that control the processing of transcripts such as introns, or a transcription termination/polyadenylation sequence.

[0148] Methods to introduce nucleic acid segment into a vector are available in the art (Sambrook et al., Molecular Cloning: A Laboratory Manual, 3rd edition, Cold Spring Harbor Press, Cold Spring Harbor, N.Y. (2001)). Briefly, a vector into which a nucleic acid segment is to be inserted is treated with one or more restriction enzymes (restriction endonuclease) to produce a linearized vector having a blunt end, a “sticky” end with a 5′ or a 3′ overhang, or any combination of the above. The vector may also be treated with a restriction enzyme and subsequently treated with another modifying enzyme, such as a polymerase, an exonuclease, a phosphatase or a kinase, to create a linearized vector that has characteristics useful for ligation of a nucleic acid segment into the vector. The nucleic acid segment that is to be inserted into the vector is treated with one or more restriction enzymes to create a linearized segment having a blunt end, a “sticky” end with a 5′ or a 3′ overhang, or any combination of the above. The nucleic acid segment may also be treated with a restriction enzyme and subsequently treated with another DNA modifying enzyme. Such DNA modifying enzymes include, but are not limited to, polymerase, exonuclease, phosphatase or a kinase, to create a nucleic acid segment that has characteristics useful for ligation of a nucleic acid segment into the vector.

[0149] The treated vector and nucleic acid segment are then ligated together to form a construct containing a nucleic acid segment according to methods available in the art (Sambrook et al., Molecular Cloning: A Laboratory Manual, 3rd edition, Cold Spring Harbor Press, Cold Spring Harbor, N.Y. (2001)). Briefly, the treated nucleic acid fragment, and the treated vector are combined in the presence of a suitable buffer and ligase. The mixture is then incubated under appropriate conditions to allow the ligase to ligate the nucleic acid fragment into the vector.

[0150] The invention also provides an expression cassette that contains a nucleic acid sequence capable of directing expression of a particular nucleic acid segment of the invention, either in vitro or in a host cell. Also, a nucleic acid segment of the invention may be inserted into the expression cassette such that an anti-sense message is produced. The expression cassette is an isolatable unit such that the expression cassette may be in linear form and functional for in vitro transcription and translation assays. The materials and procedures to conduct these assays are commercially available from Promega Corp. (Madison, Wis.). For example, an in vitro transcript may be produced by placing a nucleic acid sequence under the control of a T7 promoter and then using T7 RNA polymerase to produce an in vitro transcript. This transcript may then be translated in vitro through use of a rabbit reticulocyte lysate. Alternatively, the expression cassette can be incorporated into a vector allowing for replication and amplification of the expression cassette within a host cell or also in vitro transcription and translation of a nucleic acid segment.

[0151] Such an expression cassette may contain one or a plurality of restriction sites allowing for placement of the nucleic acid segment under the regulation of a regulatory sequence. The expression cassette can also contain a termination signal operably linked to the nucleic acid segment as well as regulatory sequences required for proper translation of the nucleic acid segment. The expression cassette containing the nucleic acid segment may be chimeric, meaning that at least one of its components is heterologous with respect to at least one of its other components. The expression cassette may also be one that is naturally occurring but has been obtained in a recombinant form useful for heterologous expression. Expression of the nucleic acid segment in the expression cassette may be under the control of a constitutive promoter or an inducible promoter, which initiates transcription only when the host cell is exposed to some particular external stimulus.

[0152] The expression cassette may include in the 5′-3′ direction of transcription, a transcriptional and translational initiation region, a nucleic acid segment and a transcriptional and translational termination region functional in vivo and/or in vitro. The termination region may be native with the transcriptional initiation region, may be native with the nucleic acid segment, or may be derived from another source.

[0153] The regulatory sequence can be a polynucleotide sequence located upstream (5′ non-coding sequences), within, or downstream (3′ non-coding sequences) of a coding sequence, and which influences the transcription, RNA processing or stability, or translation of the associated coding sequence. Regulatory sequences can include, but are not limited to, enhancers, promoters, repressor binding sites, translation leader sequences, introns, and polyadenylation signal sequences. They may include natural and synthetic sequences as well as sequences, which may be a combination of synthetic and natural sequences. While regulatory sequences are not limited to promoters, some useful regulatory sequences include constitutive promoters, inducible promoters, regulated promoters, tissue-specific promoters, viral promoters, and synthetic promoters.

[0154] A promoter is a nucleotide sequence that controls the expression of the coding sequence by providing the recognition for RNA polymerase and other factors required for proper transcription. A promoter includes a minimal promoter, consisting only of all basal elements needed for transcription initiation, such as a TATA-box and/or initiator that is a short DNA sequence comprised of a TATA-box and other sequences that serve to specify the site of transcription initiation, to which regulatory elements are added for control of expression. A promoter may be derived entirely from a native gene, or be composed of different elements derived from different promoters found in nature, or even be comprised of synthetic DNA segments. A promoter may contain DNA sequences that are involved in the binding of protein factors that control the effectiveness of transcription initiation in response to physiological or developmental conditions.

[0155] The invention also provides a construct containing a vector and an expression cassette. The vector may be selected from, but not limited to, any vector previously described. Into this vector may be inserted an expression cassette through methods known in the art and previously described (Sambrook et al., Molecular Cloning: A Laboratory Manual, 3rd edition, Cold Spring Harbor Press, Cold Spring Harbor, N.Y. (2001)). In one embodiment, the regulatory sequences of the expression cassette may be derived from a source other than the vector into which the expression cassette is inserted. In another embodiment, a construct containing a vector and an expression cassette is formed upon insertion of a nucleic acid segment of the invention into a vector that itself contains regulatory sequences. Thus, an expression cassette is formed upon insertion of the nucleic acid segment into the vector. Vectors containing regulatory sequences are available commercially, and methods for their use are known in the art (Clonetech, Promega, Stratagene).

[0156] In another aspect, this disclosure also provides (i) a nucleic acid molecule encoding a polypeptide chain of the antibody or antigen-binding fragment thereof described herein; (ii) a vector comprising the nucleic acid molecule as described; and (iii) a cultured host cell comprising the vector as described. Also provided is a method for producing a polypeptide, comprising: (a) obtaining the cultured host cell as described; (b) culturing the cultured host cell in a medium under conditions permitting expression of a polypeptide encoded by the vector and assembling of an antibody or fragment thereof; and (c) purifying the antibody or fragment from the cultured cell or the medium of the cell.

### Methods of Production

[0157] Antibodies may be produced using recombinant methods and compositions, e.g., as described in U.S. Pat. No. 4,816,567. In one embodiment, an isolated nucleic acid encoding an antibody described herein is provided. Such nucleic acid may encode an amino acid sequence comprising the VL and/or an amino acid sequence comprising the VH of the antibody (e.g., the light and/or heavy chains of the antibody). In a further embodiment, one or more vectors (e.g., expression vectors) comprising such nucleic acid are provided. In a further embodiment, a host cell comprising such nucleic acid is provided. In one such embodiment, a host cell comprises (e.g., has been transformed with): (1) a vector comprising a nucleic acid that encodes an amino acid sequence comprising the VL of the antibody and an amino acid sequence comprising the VH of the antibody, or (2) a first vector comprising a nucleic acid that encodes an amino acid sequence comprising the VL of the antibody and a second vector comprising a nucleic acid that encodes an amino acid sequence comprising the VH of the antibody. In one embodiment, the host cell is eukaryotic, e.g., a Chinese Hamster Ovary (CHO) cell or lymphoid cell (e.g., Y0, NS0, Sp20 cell). In one embodiment, a method of making an antibody is provided, wherein the method comprises culturing a host cell comprising a nucleic acid encoding the antibody, as provided above, under conditions suitable for expression of the antibody, and optionally recovering the antibody from the host cell (or host cell culture medium).

[0158] For recombinant production of an antibody, a nucleic acid encoding an antibody, e.g., as described herein, is isolated and inserted into one or more vectors for further cloning and/or expression in a host cell. Such nucleic acid may be readily isolated and sequenced using conventional procedures (e.g., by using oligonucleotide probes that are capable of binding specifically to genes encoding the heavy and light chains of the antibody).

[0159] Suitable host cells for cloning or expression of antibody-encoding vectors include prokaryotic or eukaryotic cells described herein. For example, antibodies may be produced in bacteria, in particular when glycosylation and Fc effector function are not needed. For expression of antibody fragments and polypeptides in bacteria, see, e.g., U.S. Pat. Nos. 5,648,237, 5,789,199, and 5,840,523. (See also Charlton, Methods in Molecular Biology, Vol. 248 (B.K.C. Lo, ed., Humana Press, Totowa, N.J., 2003), pp. 245-254, describing expression of antibody fragments in E. coli.) After expression, the antibody may be isolated from the bacterial cell paste in a soluble fraction and can be further purified.

[0160] In addition to prokaryotes, eukaryotic microbes such as filamentous fungi or yeast are suitable cloning or expression hosts for antibody-encoding vectors, including fungi and yeast strains whose glycosylation pathways have been “humanized,” resulting in the production of an antibody with a partially or fully human glycosylation pattern. See Gerngross, Nat. Biotech. 22:1409-1414 (2004), and Li et al., Nat. Biotech. 24:210-215 (2006).

[0161] Suitable host cells for the expression of glycosylated antibodies are also derived from multicellular organisms (invertebrates and vertebrates). Examples of invertebrate cells include plant and insect cells. Numerous baculoviral strains have been identified, which may be used in conjunction with insect cells, particularly for transfection of Spodoptera frugiperda cells.

[0162] Plant cell cultures can also be utilized as hosts. See, e.g., U.S. Pat. Nos. 5,959,177, 6,040,498, 6,420,548, 7,125,978, and 6,417,429 (describing PLANTIBODIES technology for producing antibodies in transgenic plants).

[0163] Vertebrate cells may also be used as hosts. For example, mammalian cell lines that are adapted to grow in suspension may be useful. Other examples of useful mammalian host cell lines are monkey kidney CV1 line transformed by SV40 (COS-7); human embryonic kidney line (293 or 293 cells as described, e.g., in Graham et al., J. Gen Virol. 36:59 (1977)); baby hamster kidney cells (BHK); mouse sertoli cells (TM4 cells as described, e.g., in Mather, Biol. Reprod. 23:243-251 (1980)); monkey kidney cells (CV1); African green monkey kidney cells (VERO-76); human cervical carcinoma cells (HELA); canine kidney cells (MDCK; buffalo rat liver cells (BRL 3A); human lung cells (W138); human liver cells (Hep G2); mouse mammary tumor (MMT 060562); TRI cells, as described, e.g., in Mather et al., Annals N.Y. Acad. Sci. 383:44-68 (1982); MRC 5 cells; and FS4 cells. Other useful mammalian host cell lines include CHO cells, including DHFR-CHO cells (Urlaub et al., Proc. Natl. Acad. Sci. USA 77:4216 (1980)); and myeloma cell lines such as Y0, NS0, and Sp2/0. For a review of certain mammalian host cell lines suitable for antibody production, see, e.g., Yazaki and Wu, Methods in Molecular Biology, Vol. 248 (B.K.C. Lo, ed., Humana Press, Totowa, N.J.), pp. 255-268 (2003).

### Compositions and Kits

[0164] The antibodies of this invention represent an excellent way for the development of antiviral therapies either alone or in antibody cocktails with additional anti-SARS-COV-2 virus antibodies for the treatment of human SARS-COV-2 infections in humans.

[0165] In another aspect, the present invention provides a pharmaceutical composition comprising the antibodies of the present invention described herein formulated together with a pharmaceutically acceptable carrier. The composition may optionally contain one or more additional pharmaceutically active ingredients, such as another antibody or a therapeutic agent.

[0166] In some embodiments, the pharmaceutical comprises two or more of the antibody or antigen-binding fragment thereof described herein, such as any combinations of the antibody or antigen-binding fragment thereof comprising a heavy chain and a light chain that comprise the respective amino acid sequences described herein.

[0167] The pharmaceutical compositions of the invention also can be administered in a combination therapy with, for example, another immune-stimulatory agent, an antiviral agent, a vaccine, etc. In some embodiments, a composition comprises an antibody of this invention at a concentration of at least 1 mg/ml, 5 mg/ml, 10 mg/ml, 50 mg/ml, 100 mg/ml, 150 mg/ml, 200 mg/ml, 1-300 mg/ml, or 100-300 mg/ml.

[0168] In some embodiments, the second therapeutic agent comprises an anti-inflammatory drug or an antiviral compound. In some embodiments, the antiviral compound comprises: a nucleoside analog, a peptoid, an oligopeptide, a polypeptide, a protease inhibitor, a 3C-like protease inhibitor, a papain-like protease inhibitor, or an inhibitor of an RNA dependent RNA polymerase. In some embodiments, the antiviral compound may include: acyclovir, gancyclovir, vidarabine, foscarnet, cidofovir, amantadine, ribavirin, trifluorothymidine, zidovudine, didanosine, zalcitabine, or an interferon. In some embodiments, the interferon is an interferon-a or an interferon-β.

[0169] Also within the scope of this disclosure is use of the pharmaceutical composition in the preparation of a medicament for the diagnosis, prophylaxis, treatment, or combination thereof of a condition resulting from a SARS-COV-2.

[0170] The pharmaceutical composition can comprise any number of excipients. Excipients that can be used include carriers, surface-active agents, thickening or emulsifying agents, solid binders, dispersion or suspension aids, solubilizers, colorants, flavoring agents, coatings, disintegrating agents, lubricants, sweeteners, preservatives, isotonic agents, and combinations thereof. The selection and use of suitable excipients is taught in Gennaro, ed., Remington: The Science and Practice of Pharmacy, 20th Ed. (Lippincott Williams & Wilkins 2003), the disclosure of which is incorporated herein by reference.

[0171] Preferably, a pharmaceutical composition is suitable for intravenous, intramuscular, subcutaneous, parenteral, spinal, or epidermal administration (e.g., by injection or infusion). Depending on the route of administration, the active compound can be coated in a material to protect it from the action of acids and other natural conditions that may inactivate it. The phrase “parenteral administration” as used herein means modes of administration other than enteral and topical administration, usually by injection, and includes, without limitation, intravenous, intramuscular, intraarterial, intrathecal, intracapsular, intraorbital, intracardiac, intradermal, intraperitoneal, transtracheal, subcutaneous, subcuticular, intraarticular, subcapsular, subarachnoid, intraspinal, epidural and intrasternal injection and infusion. Alternatively, an antibody of the present invention described herein can be administered via a non-parenteral route, such as a topical, epidermal, or mucosal route of administration, e.g., intranasally, orally, vaginally, rectally, sublingually, or topically.

[0172] The pharmaceutical compositions of the invention may be prepared in many forms that include tablets, hard or soft gelatin capsules, aqueous solutions, suspensions, liposomes, and other slow-release formulations, such as shaped polymeric gels. An oral dosage form may be formulated such that the antibody is released into the intestine after passing through the stomach. Such formulations are described in U.S. Pat. No. 6,306,434 and in the references contained therein.

[0173] Oral liquid pharmaceutical compositions may be in the form of, for example, aqueous or oily suspensions, solutions, emulsions, syrups, or elixirs, or may be presented as a dry product for constitution with water or other suitable vehicle before use. Such liquid pharmaceutical compositions may contain conventional additives such as suspending agents, emulsifying agents, non-aqueous vehicles (which may include edible oils), or preservatives.

[0174] An antibody can be formulated for parenteral administration (e.g., by injection, for example, bolus injection or continuous infusion) and may be presented in unit dosage form in ampules, prefilled syringes, small volume infusion containers, or multi-dose containers with an added preservative. The pharmaceutical compositions may take such forms as suspensions, solutions, or emulsions in oily or aqueous vehicles, and may contain formulatory agents such as suspending, stabilizing and/or dispersing agents. Pharmaceutical compositions suitable for rectal administration can be prepared as unit dose suppositories. Suitable carriers include saline solution and other materials commonly used in the art.

[0175] For administration by inhalation, an antibody can be conveniently delivered from an insufflator, nebulizer, a pressurized pack, or other convenient means of delivering an aerosol spray. Pressurized packs may comprise a suitable propellant such as dichlorodifluoromethane, trichlorofluoromethane, dichlorotetrafluoroethane, carbon dioxide, or other suitable gas. In the case of a pressurized aerosol, the dosage unit may be determined by providing a valve to deliver a metered amount.

[0176] Alternatively, for administration by inhalation or insufflation, an antibody may take the form of a dry powder composition, for example, a powder mix of a modulator and a suitable powder base such as lactose or starch. The powder composition may be presented in a unit dosage form in, for example, capsules or cartridges or, e.g., gelatin or blister packs from which the powder may be administered with the aid of an inhalator or insufflator. For intra-nasal administration, an antibody may be administered via a liquid spray, such as via a plastic bottle atomizer.

[0177] Pharmaceutical compositions of the invention may also contain other ingredients such as flavorings, colorings, anti-microbial agents, or preservatives. It will be appreciated that the amount of an antibody required for use in treatment will vary not only with the particular carrier selected but also with the route of administration, the nature of the condition being treated, and the age and condition of the patient. Ultimately the attendant health care provider may determine a proper dosage. In addition, a pharmaceutical composition may be formulated as a single unit dosage form.

[0178] The pharmaceutical composition of the present invention can be in the form of sterile aqueous solutions or dispersions. It can also be formulated in a microemulsion, liposome, or other ordered structure suitable to high drug concentration.

[0179] An antibody of the present invention described herein can be administered as a sustained release formulation, in which case less frequent administration is required. Dosage and frequency vary depending on the half-life of the antibody in the patient. In general, human antibodies show the longest half-life, followed by humanized antibodies, chimeric antibodies, and nonhuman antibodies. The dosage and frequency of administration can vary depending on whether the treatment is prophylactic or therapeutic. In prophylactic applications, a relatively low dosage is administered at relatively infrequent intervals over a long period of time. Some patients continue to receive treatment for the rest of their lives. In therapeutic applications, a relatively high dosage at relatively short intervals is sometimes required until progression of the disease is reduced or terminated, and preferably until the patient shows partial or complete amelioration of symptoms of disease. Thereafter, the patient can be administered a prophylactic regime.

[0180] The amount of active ingredient that can be combined with a carrier material to produce a single dosage form will vary depending upon the subject being treated and the particular mode of administration and will generally be that amount of the composition, which produces a therapeutic effect. Generally, out of one hundred percent, this amount will range from about 0.01% to about 99% of active ingredient, preferably from about 0.1% to about 70%, most preferably from about 1% to about 30% of active ingredient in combination with a pharmaceutically acceptable carrier.

[0181] Dosage regimens can be adjusted to provide the optimum desired response (e.g., a therapeutic response). For example, a single bolus can be administered, several divided doses can be administered over time, or the dose can be proportionally reduced or increased as indicated by the exigencies of the therapeutic situation. It is especially advantageous to formulate parenteral compositions in dosage unit form for ease of administration and uniformity of dosage. Dosage unit form as used herein refers to physically discrete units suited as unitary dosages for the subjects to be treated; each unit contains a predetermined quantity of active compound calculated to produce the desired therapeutic effect in association with the required pharmaceutical carrier. Alternatively, the antibody can be administered as a sustained release formulation, in which case less frequent administration is required. For administration of the antibody, the dosage ranges from about 0.0001 to 800 mg/kg, and more usually 0.01 to 5 mg/kg, of the host body weight. For example, dosages can be 0.3 mg/kg body weight, 1 mg/kg body weight, 3 mg/kg body weight, 5 mg/kg body weight or 10 mg/kg body weight or within the range of 1-10 mg/kg. An exemplary treatment regime entails administration once per week, once every two weeks, once every three weeks, once every four weeks, once a month, once every 3 months or once every three to 6 months. Preferred dosage regimens for an antibody of the invention include 1 mg/kg body weight or 3 mg/kg body weight via intravenous administration, with the antibody being given using one of the following dosing schedules: (i) every four weeks for six dosages, then every three months; (ii) every three weeks; (iii) 3 mg/kg body weight once followed by 1 mg/kg body weight every three weeks. In some methods, dosage is adjusted to achieve a plasma antibody concentration of about 1-1000 μg/ml, and in some methods, about 25-300 μg/ml. A “therapeutically effective dosage” of an antibody of the invention preferably results in a decrease in severity of disease symptoms, an increase in frequency and duration of disease symptom-free periods, or a prevention of impairment or disability due to the disease affliction. For example, for the treatment of SARS-CoV-2 infection in a subject, a “therapeutically effective dosage” preferably inhibits SARS-COV-2 virus replication or uptake by host cells by at least about 20%, more preferably by at least about 40%, even more preferably by at least about 60%, and still more preferably by at least about 80% relative to untreated subjects. A therapeutically effective amount of a therapeutic compound can neutralize SARS-COV-2 virus, or otherwise ameliorate symptoms in a subject, which is typically a human or can be another mammal.

[0182] The pharmaceutical composition can be a controlled release formulation, including implants, transdermal patches, and microencapsulated delivery systems. Biodegradable, biocompatible polymers can be used, such as ethylene-vinyl acetate, polyanhydrides, polyglycolic acid, collagen, polyorthoesters, and polylactic acid. See, e.g., Sustained and Controlled Release Drug Delivery Systems, J. R. Robinson, ed., Marcel Dekker, Inc., New York, 1978.

[0183] Therapeutic compositions can be administered via medical devices such as (1) needleless hypodermic injection devices (e.g., U.S. Pat. Nos. 5,399,163; 5,383,851; 5,312,335; 5,064,413; 4,941,880; 4,790,824; and 4,596,556); (2) micro-infusion pumps (U.S. Pat. No. 4,487,603); (3) transdermal devices (U.S. Pat. No. 4,486,194); (4) infusion apparati (U.S. Pat. Nos. 4,447,233 and 4,447,224); and (5) osmotic devices (U.S. Pat. Nos. 4,439,196 and 4,475,196); the disclosures of which are incorporated herein by reference.

[0184] In some embodiments, the human monoclonal antibodies of the invention described herein can be formulated to ensure proper distribution in vivo. For example, to ensure that the therapeutic compounds of the invention cross the blood-brain barrier, they can be formulated in liposomes, which may additionally comprise targeting moieties to enhance selective transport to specific cells or organs. See, e.g., U.S. Pat. Nos. 4,522,811; 5,374,548; 5,416,016; and 5,399,331; V.V. Ranade (1989) Clin. Pharmacol. 29:685; Umezawa et al., (1988) Biochem. Biophys. Res. Commun. 153:1038; Bloeman et al. (1995) FEBS Lett. 357:140; M. Owais et al. (1995) Antimicrob. Agents Chemother. 39:180; Briscoe et al. (1995) Am. Physiol. 1233:134; Schreier et al. (1994). Biol. Chem. 269:9090; Keinanen and Laukkanen (1994) FEBS Lett. 346:123; and Killion and Fidler (1994) Immunomethods 4:273.

[0185] In some embodiments, the initial dose may be followed by administration of a second or a plurality of subsequent doses of the antibody or antigen-binding fragment thereof in an amount that can be approximately the same or less than that of the initial dose, wherein the subsequent doses are separated by at least 1 day to 3 days; at least one week, at least 2 weeks; at least 3 weeks; at least 4 weeks; at least 5 weeks; at least 6 weeks; at least 7 weeks; at least 8 weeks; at least 9 weeks; at least 10 weeks; at least 12 weeks; or at least 14 weeks.

[0186] Various delivery systems are known and can be used to administer the pharmaceutical composition of the invention, e.g., encapsulation in liposomes, microparticles, microcapsules, recombinant cells capable of expressing the mutant viruses, receptor-mediated endocytosis (see, e.g., Wu et al. (1987) J. Biol. Chem. 262:4429-4432). Methods of introduction include, but are not limited to, intradermal, transdermal, intramuscular, intraperitoneal, intravenous, subcutaneous, intranasal, epidural, and oral routes. The composition may be administered by any convenient route, for example by infusion or bolus injection, by absorption through epithelial or mucocutaneous linings (e.g., oral mucosa, rectal and intestinal mucosa, etc.) and may be administered together with other biologically active agents. Administration can be systemic or local. The pharmaceutical composition can also be delivered in a vesicle, in particular, a liposome (see, for example, Langer (1990) Science 249:1527-1533).

[0187] The use of nanoparticles to deliver the antibodies of the present invention is also contemplated herein. Antibody-conjugated nanoparticles may be used both for therapeutic and diagnostic applications. Antibody-conjugated nanoparticles and methods of preparation and use are described in detail by Arruebo, M., et al. 2009 (“Antibody-conjugated nanoparticles for biomedical applications” in J. Nanomat. Volume 2009, Article ID 439389), incorporated herein by reference. Nanoparticles may be developed and conjugated to antibodies contained in pharmaceutical compositions to target cells. Nanoparticles for drug delivery have also been described in, for example, U.S. Pat. No. 8,257,740, or U.S. Pat. No. 8,246,995, each incorporated herein in its entirety.

[0188] In certain situations, the pharmaceutical composition can be delivered in a controlled release system. In one embodiment, a pump may be used. In another embodiment, polymeric materials can be used. In yet another embodiment, a controlled release system can be placed in proximity of the composition's target, thus requiring only a fraction of the systemic dose.

[0189] The injectable preparations may include dosage forms for intravenous, subcutaneous, intracutaneous, intracranial, intraperitoneal, intramuscular injections, drip infusions, etc. These injectable preparations may be prepared by methods publicly known. For example, the injectable preparations may be prepared, e.g., by dissolving, suspending, or emulsifying the antibody or its salt described herein in a sterile aqueous medium or an oily medium conventionally used for injections. As the aqueous medium for injections, there are, for example, physiological saline, an isotonic solution containing glucose and other auxiliary agents, etc., which may be used in combination with an appropriate solubilizing agent such as an alcohol (e.g., ethanol), a polyalcohol (e.g., propylene glycol, polyethylene glycol), a nonionic surfactant [e.g., polysorbate 80, HCO-50 (polyoxyethylene (50 mol) adduct of hydrogenated castor oil)], etc. As the oily medium, there are employed, e.g., sesame oil, soybean oil, etc., which may be used in combination with a solubilizing agent such as benzyl benzoate, benzyl alcohol, etc. The injection thus prepared is preferably filled in an appropriate ampoule.

[0190] A pharmaceutical composition of the present invention can be delivered subcutaneously or intravenously with a standard needle and syringe. In addition, with respect to subcutaneous delivery, a pen delivery device readily has applications in delivering a pharmaceutical composition of the present invention. Such a pen delivery device can be reusable or disposable. A reusable pen delivery device generally utilizes a replaceable cartridge that contains a pharmaceutical composition. Once all of the pharmaceutical composition within the cartridge has been administered and the cartridge is empty, the empty cartridge can readily be discarded and replaced with a new cartridge that contains the pharmaceutical composition. The pen delivery device can then be reused. In a disposable pen delivery device, there is no replaceable cartridge. Rather, the disposable pen delivery device comes prefilled with the pharmaceutical composition held in a reservoir within the device. Once the reservoir is emptied of the pharmaceutical composition, the entire device is discarded.

[0191] Numerous reusable pens and autoinjector delivery devices have applications in the subcutaneous delivery of a pharmaceutical composition of the present invention. Examples include, but certainly are not limited to AUTOPEN™ (Owen Mumford, Inc., Woodstock, UK), DISETRONIC™ pen (Disetronic Medical Systems, Burghdorf, Switzerland), HUMALOG MIX 75/25™ pen, HUMALOG™ pen, HUMALIN 70/30™ pen (Eli Lilly and Co., Indianapolis, IN), NOVOPEN™ I, II and III (Novo Nordisk, Copenhagen, Denmark), NOVOPEN JUNIOR™ (Novo Nordisk, Copenhagen, Denmark), BD™ pen (Becton Dickinson, Franklin Lakes, NJ), OPTIPEN™, OPTIPEN PRO™, OPTIPEN STARLET™, and OPTICLIK™ (Sanofi-Aventis, Frankfurt, Germany), to name only a few. Examples of disposable pen delivery devices having applications in subcutaneous delivery of a pharmaceutical composition of the present invention include, but certainly are not limited to, the SOLOSTAR™ pen (Sanofi-Aventis), the FLEXPEN™ (Novo Nordisk), and the KWIKPEN™ (Eli Lilly), the SURECLICK™ Autoinjector (Amgen, Thousand Oaks, CA), the PENLET™ (Haselmeier, Stuttgart, Germany), the EPIPEN (Dey, L. P.) and the HUMIRA™ Pen (Abbott Labs, Abbott Park, IL), to name only a few.

[0192] Advantageously, the pharmaceutical compositions for oral or parenteral use described herein are prepared into dosage forms in a unit dose suited to fit a dose of the active ingredients. Such dosage forms in a unit dose include, for example, tablets, pills, capsules, injections (ampoules), suppositories, etc. The amount of the antibody contained is generally about 5 to about 500 mg per dosage form in a unit dose; especially in the form of injection, it is preferred that the antibody is contained in about 5 to about 300 mg and in about 10 to about 300 mg for the other dosage forms.

[0193] In another aspect, this disclosure provides a kit comprising a pharmaceutically acceptable dose unit of the antibody or antigen-binding fragment thereof or the pharmaceutical composition as described herein. Also within the scope of this disclosure is a kit for the diagnosis, prognosis, or monitoring of treatment of SARS-COV-2 in a subject, comprising: the antibody or antigen-binding fragment thereof as described; and a least one detection reagent that binds specifically to the antibody or antigen-binding fragment thereof.

[0194] In some embodiments, the kit also includes a container that contains the composition and optionally informational material. The informational material can be descriptive, instructional, marketing, or other material that relates to the methods described herein and/or the use of the agents for therapeutic benefit. In an embodiment, the kit also includes an additional therapeutic agent, as described herein. For example, the kit includes a first container that contains the composition and a second container for the additional therapeutic agent.

[0195] The informational material of the kits is not limited in its form. In some embodiments, the informational material can include information about production of the composition, concentration, date of expiration, batch or production site information, and so forth. In one embodiment, the informational material relates to methods of administering the composition, e.g., in a suitable dose, dosage form, or mode of administration (e.g., a dose, dosage form, or mode of administration described herein), to treat a subject in need thereof. In one embodiment, the instructions provide a dosing regimen, dosing schedule, and/or route of administration of the composition or the additional therapeutic agent. The information can be provided in a variety of formats, including printed text, computer-readable material, video recording, audio recording, or information that contains a link or address to substantive material.

[0196] The kit can include one or more containers for the composition. In some embodiments, the kit contains separate containers, dividers, or compartments for the composition and informational material. For example, the composition can be contained in a bottle or vial, and the informational material can be contained in a plastic sleeve or packet. In other embodiments, the separate elements of the kit are contained within a single, undivided container. For example, the composition is contained in a bottle or vial that has attached thereto the informational material in the form of a label. In some embodiments, the kit includes a plurality (e.g., a pack) of individual containers, each containing one or more unit dosage forms (e.g., a dosage form described herein) of the agents.

[0197] The kit optionally includes a device suitable for administration of the composition or other suitable delivery device. The device can be provided pre-loaded with one or both of the agents or can be empty, but suitable for loading. Such a kit may optionally contain a syringe to allow for injection of the antibody contained within the kit into an animal, such as a human.

### Methods of Use

### Methods of Treatment

[0198] The antibodies, compositions, and formulations described herein can be used to neutralize SARS-COV-2 virus, thereby treating or preventing SARS-COV-2 infections.

[0199] Accordingly, in one aspect, this disclosure further provides a method of neutralizing SARS-COV-2 in a subject, comprising administering to a subject in need thereof a therapeutically effective amount of the antibody or antigen-binding fragment thereof or a therapeutically effective amount of the pharmaceutical composition, as described herein.

[0200] In another aspect, this disclosure additionally provides a method of preventing or treating a SARS-COV-2 infection, comprising administering to a subject in need thereof a therapeutically effective amount of the antibody or antigen-binding fragment thereof or a therapeutically effective amount of the pharmaceutical composition, as described herein.

[0201] The neutralizing of the SARS-COV-2 virus can be done via (i) inhibiting SARS-COV-2 virus binding to a target cell; (ii) inhibiting SARS-COV-2 virus uptake by a target cell; (iii) inhibiting SARS-COV-2 virus replication; and (iv) inhibiting SARS-COV-2 virus particles release from infected cells. One skilled in the art possesses the ability to perform any assay to assess neutralization of SARS-COV-2 virus.

[0202] Notably, the neutralizing properties of antibodies may be assessed by a variety of tests, which all may assess the consequences of (i) inhibition of SARS-COV-2 virus binding to a target cell; (ii) inhibition of SARS-COV-2 virus uptake by a target cell; (iii) inhibition of SARS-COV-2 virus replication; and (iv) inhibition of SARS-COV-2 virus particles release from infected cells. In other words, implementing different tests may lead to the observation of the same consequence, i.e., the loss of infectivity of the SARS-COV-2 virus. Thus, in one embodiment, the present invention provides a method of neutralizing a SARS-COV-2 virus in a subject comprising administering to the subject a therapeutically effective amount of the antibody of the present invention described herein.

[0203] Another aspect of the present invention provides a method of treating a SARS-COV-2-related disease. Such a method includes therapeutic (following SARS-COV-2 infection) and prophylactic (prior to SARS-COV-2 exposure, infection, or pathology). For example, therapeutic and prophylactic methods of treating an individual for a SARS-COV-2 infection include treatment of an individual having or at risk of having a SARS-COV-2 infection or pathology, treating an individual with a SARS-COV-2 infection, and methods of protecting an individual from a SARS-CoV-2 infection, to decrease or reduce the probability of a SARS-COV-2 infection in an individual, to decrease or reduce susceptibility of an individual to a SARS-COV-2 infection, or to inhibit or prevent a SARS-COV-2 infection in an individual, and to decrease, reduce, inhibit or suppress transmission of a SARS-COV-2 from an infected individual to an uninfected individual. Such methods include administering an antibody of the present invention or a composition comprising the antibody disclosed herein to therapeutically or prophylactically treat (vaccinate or immunize) an individual having or at risk of having a SARS-COV-2 infection or pathology. Accordingly, methods can treat the SARS-COV-2 infection or pathology, or provide the individual with protection from infection (e.g., prophylactic protection).

[0204] In one embodiment, a method of treating a SARS-COV-2-related disease comprises administering to an individual in need thereof an antibody or therapeutic composition disclosed herein in an amount sufficient to reduce one or more physiological conditions or symptoms associated with a SARS-COV-2 infection or pathology, thereby treating the SARS-COV-2-related disease.

[0205] In one embodiment, an antibody or therapeutic composition disclosed herein is used to treat a SARS-COV-2-related disease. Use of an antibody or therapeutic composition disclosed herein treats a SARS-COV-2-related disease by reducing one or more physiological conditions or symptoms associated with a SARS-COV-2 infection or pathology. In aspects of this embodiment, administration of an antibody or therapeutic composition disclosed herein is in an amount sufficient to reduce one or more physiological conditions or symptoms associated with a SARS-CoV-2 infection or pathology, thereby treating the SARS-COV-2-based disease. In other aspects of this embodiment, administration of an antibody or therapeutic composition disclosed herein is in an amount sufficient to increase, induce, enhance, augment, promote or stimulate SARS-COV-2 clearance or removal; or decrease, reduce, inhibit, suppress, prevent, control, or limit transmission of SARS-COV-2 to another individual.

[0206] One or more physiological conditions or symptoms associated with a SARS-COV-2 infection or pathology will respond to a method of treatment disclosed herein. The symptoms of SARS-COV-2 infection or pathology vary, depending on the phase of infection.

[0207] In some embodiments, the method of neutralizing SARS-COV-2 in a subject comprises administering to a subject in need thereof a therapeutically effective amount of a first antibody or antigen-binding fragment thereof and a second antibody or antigen-binding fragment thereof of the antibody or antigen-binding fragment, as described herein, wherein the first antibody or antigen-binding fragment thereof and the second antibody or antigen binding fragment thereof exhibit synergistic activity or a therapeutically effective amount of the pharmaceutical composition described herein.

[0208] In some embodiments, the method of preventing or treating a SARS-COV-2 infection, comprising administering to a subject in need thereof a therapeutically effective amount of a first antibody or antigen-binding fragment thereof and a second antibody or antigen-binding fragment thereof of the antibody or antigen-binding fragment, as described herein, wherein the first antibody or antigen-binding fragment thereof and the second antibody or antigen binding fragment thereof exhibit synergistic activity or a therapeutically effective amount of the pharmaceutical composition described herein. In some embodiments, the first antibody or antigen-binding fragment thereof is administered before, after, or concurrently with the second antibody or antigen-binding fragment thereof.

[0209] In some embodiments, the first antibody or antigen-binding fragment thereof and the second antibody or antigen-binding fragment thereof can be any combinations of the antibody or antigen-binding fragment thereof comprising a heavy chain and a light chain that comprise the respective amino acid sequences described herein.

[0210] In some embodiments, the first antibody or antigen-binding fragment thereof comprises a heavy chain variable region and a light chain variable region comprising a HCVR/LCVR amino acid sequence pair of SEQ ID NOs: 1-2, 3-4, 5-6, 7-8, 9-10, 11-12, 13-14, 15-16, 17-18, 19-20, 21-22, 23-24, 25-26, 27-28, 29-30, 31-32, 33-34, 35-36, 37-38, 39-40, 41-42, 43-44, 45-46, 47-48, 49-50, 51-52, 53-54, 55-56, 57-58, 59-60, 61-62, 63-64, 65-66, 67-68, 69-70, 71-72, 73-74, 75-76, 77-78, 79-80, 81-82, 83-84, 85-86, 87-88, 89-90, 91-92, 93-94, 95-96, 97-98, 99-100, 101-102, 103-104, 105-106, 107-108, 109-110, 111-112, 113-114, 115-116, 117-118, 119-120, 121-122, 123-124, 125-126, 127-128, 129-130, 131-132, 133-134, 135-136, 137-138, 139-140, 141-142, 143-144, 145-146, 147-148, 149-150, 151-152, 153-154, 155-156, 157-158, 159-160, 161-162, 163-164, 165-166, 167-168, 169-170, 171-172, 173-174, 175-176, 177-178, 179-180, 181-182, 183-184, 185-186, 187-188, 189-190, 191-192, 193-194, 195-196, 197-198, 199-200, 201-202, 203-204, 205-206, 207-208, 209-210, 211-212, 213-214, 215-216, 217-218, 219-220, 221-222, 223-224, 225-226, 227-228, 229-230, 231-232, 233-234, 235-236, 237-238, 239-240, 241-242, 243-244, 245-246, 247-248, 249-250, 251-252, 253-254, 255-256, 257-258, 259-260, 261-262, 263-264, 265-266, 267-268, 269-270, 271-272, 273-274, 275-276, 277-278, 279-280, 281-282, 283-284, 285-286, 287-288, 289-290, 291-292, 293-294, 295-296, 297-298, 299-300, 301-302, 303-304, 305-306, 307-308, 309-310, 311-312, 313-314, 315-316, 317-318, 319-320, 321-322, 323-324, 325-326, 327-328, 329-330, 331-332, 333-334, 335-336, 337-338, 339-340, 341-342, 343-344, 345-346, 347-348, 349-350, 351-352, 353-354, 355-356, 357-358, 359-360, 361-362, 363-364, 365-366, 367-368, 369-370, 371-372, 373-374, 375-376, 377-378, 379-380, 381-382, 383-384, 385-386, 387-388, 389-390, 391-392, 393-394, 395-396, 397-398, 399-400, 401-402, 403-404, 405-406, 407-408, 409-410, 411-412, 413-414, 415-416, 417-418, 419-420, 421-422, 423-424, 425-426, 427-428, 429-430, 431-432, 433-434, 435-436, 437-438, 439-440, 441-442, 443-444, 445-446, 447-448, 449-450, 451-452, 453-454, 455-456, 457-458, 459-460, 461-462, 463-464, 465-466, 467-468, 469-470, 471-472, 473-474, 475-476, 477-478, 479-480, 481-482, 483-484, 485-486, 487-488, 489-490, 491-492, 493-494, 495-496, 497-498, 499-500, 501-502, 503-504, 505-506, 507-508, 509-510, 511-512, 513-514, 515-516, 517-518, 519-520, 521-522, 523-524, 525-526, 527-528, 529-530, 531-532, 533-534, 535-536, 537-538, 539-540, 541-542, 543-544, 545-546, 547-548, or 549-550.

[0211] In some embodiments, the second antibody or antigen-binding fragment thereof comprising a HCVR/LCVR amino acid sequence pair of SEQ ID NOs: 1-2, 3-4, 5-6, 7-8, 9-10, 11-12, 13-14, 15-16, 17-18, 19-20, 21-22, 23-24, 25-26, 27-28, 29-30, 31-32, 33-34, 35-36, 37-38, 39-40, 41-42, 43-44, 45-46, 47-48, 49-50, 51-52, 53-54, 55-56, 57-58, 59-60, 61-62, 63-64, 65-66, 67-68, 69-70, 71-72, 73-74, 75-76, 77-78, 79-80, 81-82, 83-84, 85-86, 87-88, 89-90, 91-92, 93-94, 95-96, 97-98, 99-100, 101-102, 103-104, 105-106, 107-108, 109-110, 111-112, 113-114, 115-116, 117-118, 119-120, 121-122, 123-124, 125-126, 127-128, 129-130, 131-132, 133-134, 135-136, 137-138, 139-140, 141-142, 143-144, 145-146, 147-148, 149-150, 151-152, 153-154, 155-156, 157-158, 159-160, 161-162, 163-164, 165-166, 167-168, 169-170, 171-172, 173-174, 175-176, 177-178, 179-180, 181-182, 183-184, 185-186, 187-188, 189-190, 191-192, 193-194, 195-196, 197-198, 199-200, 201-202, 203-204, 205-206, 207-208, 209-210, 211-212, 213-214, 215-216, 217-218, 219-220, 221-222, 223-224, 225-226, 227-228, 229-230, 231-232, 233-234, 235-236, 237-238, 239-240, 241-242, 243-244, 245-246, 247-248, 249-250, 251-252, 253-254, 255-256, 257-258, 259-260, 261-262, 263-264, 265-266, 267-268, 269-270, 271-272, 273-274, 275-276, 277-278, 279-280, 281-282, 283-284, 285-286, 287-288, 289-290, 291-292, 293-294, 295-296, 297-298, 299-300, 301-302, 303-304, 305-306, 307-308, 309-310, 311-312, 313-314, 315-316, 317-318, 319-320, 321-322, 323-324, 325-326, 327-328, 329-330, 331-332, 333-334, 335-336, 337-338, 339-340, 341-342, 343-344, 345-346, 347-348, 349-350, 351-352, 353-354, 355-356, 357-358, 359-360, 361-362, 363-364, 365-366, 367-368, 369-370, 371-372, 373-374, 375-376, 377-378, 379-380, 381-382, 383-384, 385-386, 387-388, 389-390, 391-392, 393-394, 395-396, 397-398, 399-400, 401-402, 403-404, 405-406, 407-408, 409-410, 411-412, 413-414, 415-416, 417-418, 419-420, 421-422, 423-424, 425-426, 427-428, 429-430, 431-432, 433-434, 435-436, 437-438, 439-440, 441-442, 443-444, 445-446, 447-448, 449-450, 451-452, 453-454, 455-456, 457-458, 459-460, 461-462, 463-464, 465-466, 467-468, 469-470, 471-472, 473-474, 475-476, 477-478, 479-480, 481-482, 483-484, 485-486, 487-488, 489-490, 491-492, 493-494, 495-496, 497-498, 499-500, 501-502, 503-504, 505-506, 507-508, 509-510, 511-512, 513-514, 515-516, 517-518, 519-520, 521-522, 523-524, 525-526, 527-528, 529-530, 531-532, 533-534, 535-536, 537-538, 539-540, 541-542, 543-544, 545-546, 547-548, or 549-550; wherein the first antibody or antigen-binding fragment thereof is different from the second antibody or antigen-binding fragment thereof.

[0212] In some embodiments, the second therapeutic agent comprises an anti-inflammatory drug or an antiviral compound. In some embodiments, the antiviral compound comprises: a nucleoside analog, a peptoid, an oligopeptide, a polypeptide, a protease inhibitor, a 3C-like protease inhibitor, a papain-like protease inhibitor, or an inhibitor of an RNA dependent RNA polymerase. In some embodiments, the antiviral compound may include: acyclovir, gancyclovir, vidarabine, foscarnet, cidofovir, amantadine, ribavirin, trifluorothymidine, zidovudine, didanosine, zalcitabine, or an interferon. In some embodiments, the interferon is an interferon-a or an interferon-β.

[0213] In some embodiments, the antibody or antigen-binding fragment thereof is administered before, after, or concurrently with the second therapeutic agent or therapy. In some embodiments, the antibody or antigen-binding fragment thereof is administered to the subject intravenously, subcutaneously, or intraperitoneally. In some embodiments, the antibody or antigen-binding fragment thereof is administered prophylactically or therapeutically.

[0214] The antibodies described herein can be used together with one or more of other anti-SARS-CoV-2 virus antibodies to neutralize SARS-COV-2 virus, thereby treating SARS-COV-2 infections.

### Combination Therapies

[0215] Combination therapies may include an anti-SARS-COV-2 antibody of the invention and any additional therapeutic agent that may be advantageously combined with an antibody of the invention or with a biologically active fragment of an antibody of the invention. The antibodies of the present invention may be combined synergistically with one or more drugs or therapy used to treat a disease or disorder associated with a viral infection, such as a SARS-COV-2 infection. In some embodiments, the antibodies of the invention may be combined with a second therapeutic agent to ameliorate one or more symptoms of said disease. In some embodiments, the antibodies of the invention may be combined with a second antibody to provide synergistic activity in ameliorating one or more symptoms of said disease. In some embodiments, the first antibody or antigen-binding fragment thereof is administered before, after, or concurrently with the second antibody or antigen-binding fragment thereof.

[0216] For example, the antibody described herein can be used in various detection methods for use in, e.g., monitoring the progression of a SARS-COV-2 infection; monitoring patient response to treatment for such an infection, etc. The present disclosure provides methods of detecting a neuraminidase polypeptide in a biological sample obtained from an individual. The methods generally involve: a) contacting the biological sample with a subject anti-neuraminidase antibody; and b) detecting binding, if any, of the antibody to an epitope present in the sample. In some instances, the antibody comprises a detectable label. The level of neuraminidase polypeptide detected in the biological sample can provide an indication of the stage, degree, or severity of a SARS-COV-2 infection. The level of the neuraminidase polypeptide detected in the biological sample can provide an indication of the individual's response to treatment for a SARS-COV-2 infection.

[0217] In some embodiments, the second therapeutic agent is another antibody to a SARS-COV-2 protein or a fragment thereof. It is contemplated herein to use a combination (“cocktail”) of antibodies with broad neutralization or inhibitory activity against SARS-COV-2. In some embodiments, non-competing antibodies may be combined and administered to a subject in need thereof. In some embodiments, the antibodies comprising the combination bind to distinct non-overlapping epitopes on the protein. In some embodiments, the second antibody may possess a longer half-life in human serum.

[0218] As used herein, the term “in combination with” means that additional therapeutically active component(s) may be administered prior to, concurrent with, or after the administration of the anti-SARS-COV-2 antibody of the present invention. The term “in combination with” also includes sequential or concomitant administration of an anti-SARS-COV-2 antibody and a second therapeutic agent.

[0219] The additional therapeutically active component(s) may be administered to a subject prior to administration of an anti-SARS-COV-2 antibody of the present invention. For example, a first component may be deemed to be administered “prior to” a second component if the first component is administered 1 week before, 72 hours before, 60 hours before, 48 hours before, 36 hours before, 24 hours before, 12 hours before, 6 hours before, 5 hours before, 4 hours before, 3 hours before, 2 hours before, 1 hour before, 30 minutes before, 15 minutes before, 10 minutes before, 5 minutes before, or less than 1 minute before administration of the second component. In other embodiments, the additional therapeutically active component(s) may be administered to a subject after administration of an anti-SARS-COV-2 antibody of the present invention. For example, a first component may be deemed to be administered “after” a second component if the first component is administered 1 minute after, 5 minutes after, 10 minutes after, 15 minutes after, 30 minutes after, 1 hour after, 2 hours after, 3 hours after, 4 hours after, 5 hours after, 6 hours after, 12 hours after, 24 hours after, 36 hours after, 48 hours after, 60 hours after, 72 hours after administration of the second component. In yet other embodiments, the additional therapeutically active component(s) may be administered to a subject concurrent with administration of an anti-SARS-COV-2 antibody of the present invention. “Concurrent” administration, for purposes of the present invention, includes, e.g., administration of an anti-SARS-COV-2 antibody and an additional therapeutically active component to a subject in a single dosage form, or in separate dosage forms administered to the subject within about 30 minutes or less of each other. If administered in separate dosage forms, each dosage form may be administered via the same route (e.g., both the anti-SARS-COV-2 antibody and the additional therapeutically active component may be administered intravenously, etc.); alternatively, each dosage form may be administered via a different route (e.g., the anti-SARS-COV-2 antibody may be administered intravenously, and the additional therapeutically active component may be administered orally). In any event, administering the components in a single dosage form, in separate dosage forms by the same route, or in separate dosage forms by different routes are all considered “concurrent administration,” for purposes of the present disclosure. For purposes of the present disclosure, administration of an anti-SARS-COV-2 antibody “prior to,” “concurrent with,” or “after” (as those terms are defined hereinabove) administration of an additional therapeutically active component is considered administration of an anti-SARS-COV-2 antibody “in combination with” an additional therapeutically active component.

[0220] The present invention includes pharmaceutical compositions in which an anti-SARS-COV-2 antibody of the present invention is co-formulated with one or more of the additional therapeutically active component(s) as described elsewhere herein.

### Administration Regimens

[0221] According to certain embodiments, a single dose of an anti-SARS-COV-2 antibody of the invention (or a pharmaceutical composition comprising a combination of an anti-SARS-COV-2 antibody and any of the additional therapeutically active agents mentioned herein) may be administered to a subject in need thereof. According to certain embodiments of the present invention, multiple doses of an anti-SARS-COV-2 antibody (or a pharmaceutical composition comprising a combination of an anti-SARS-COV-2 antibody and any of the additional therapeutically active agents mentioned herein) may be administered to a subject over a defined time course. The methods according to this aspect of the invention comprise sequentially administering to a subject multiple doses of an anti-SARS-COV-2 antibody of the invention. As used herein, “sequentially administering” means that each dose of anti-SARS-COV-2 antibody is administered to the subject at a different point in time, e.g., on different days separated by a predetermined interval (e.g., hours, days, weeks, or months). The present invention includes methods that comprise sequentially administering to the patient a single initial dose of an anti-SARS-COV-2 antibody, followed by one or more secondary doses of the anti-SARS-COV-2 antibody, and optionally followed by one or more tertiary doses of the anti-SARS-COV-2 antibody.

[0222] The terms “initial dose,” “secondary doses,” and “tertiary doses,” refer to the temporal sequence of administration of the anti-SARS-COV-2 antibody of the invention. Thus, the “initial dose” is the dose, which is administered at the beginning of the treatment regimen (also referred to as the “baseline dose”); the “secondary doses” are the doses, which are administered after the initial dose; and the “tertiary doses” are the doses which are administered after the secondary doses. The initial, secondary, and tertiary doses may all contain the same amount of anti-SARS-COV-2 antibody, but generally may differ from one another in terms of frequency of administration. In some embodiments, however, the amount of anti-SARS-COV-2 antibody contained in the initial, secondary and/or tertiary doses varies from one another (e.g., adjusted up or down as appropriate) during the course of treatment. In some embodiments, two or more (e.g., 2, 3, 4, or 5) doses are administered at the beginning of the treatment regimen as “loading doses” followed by subsequent doses that are administered on a less frequent basis (e.g., “maintenance doses”).

[0223] In certain exemplary embodiments of the present invention, each secondary and/or tertiary dose is administered 1 to 48 hours (e.g., 1, 1 1/2, 2, 21/2, 3, 31/2, 4, 41/2, 5, 51/2, 6, 61/2, 7, 71/2, 8, 81/2, 9, 91/2, 10, 101/2, 11, 11 1/2, 12, 121/2, 13, 131/2, 14, 141/2, 15, 151/2, 16, 161/2, 17, 171/2, 18, 181/2, 19, 191/2, 20, 201/2, 21, 21 1/2, 22, 221/2, 23, 23 1/2, 24, 241/2, 25, 25 1/2, 26, 261/2, or more) after the immediately preceding dose. The phrase “the immediately preceding dose,” as used herein, means, in a sequence of multiple administrations, the dose of anti-SARS-COV-2 antibody, which is administered to a patient prior to the administration of the very next dose in the sequence with no intervening doses.

[0224] The methods, according to this aspect of the invention, may comprise administering to a patient any number of secondary and/or tertiary doses of an anti-SARS-COV-2 antibody. For example, In some embodiments, only a single secondary dose is administered to the patient. In other embodiments, two or more (e.g., 2, 3, 4, 5, 6, 7, 8, or more) secondary doses are administered to the patient. Likewise, In some embodiments, only a single tertiary dose is administered to the patient. In other embodiments, two or more (e.g., 2, 3, 4, 5, 6, 7, 8, or more) tertiary doses are administered to the patient.

[0225] In some embodiments of the invention, the frequency at which the secondary and/or tertiary doses are administered to a patient can vary over the course of the treatment regimen. The frequency of administration may also be adjusted during the course of treatment by a physician depending on the needs of the individual patient following clinical examination.

### Diagnostic Uses of the Antibodies

[0226] The anti-SARS-COV-2 antibodies of the present invention may be used to detect and/or measure SARS-COV-2 in a sample, e.g., for diagnostic purposes. Some embodiments contemplate the use of one or more antibodies of the present invention in assays to detect a SARS-COV-2-associated disease or disorder. Exemplary diagnostic assays for SARS-COV-2 may comprise, e.g., contacting a sample obtained from a patient with an anti-SARS-COV-2 antibody of this disclosure, wherein the anti-SARS-COV-2 antibody is labeled with a detectable label or reporter molecule or used as a capture ligand to selectively isolate SARS-COV-2 from patient samples. Alternatively, an unlabeled anti-SARS-COV-2 antibody can be used in diagnostic applications in combination with a secondary antibody, which is itself detectably labeled. The detectable label or reporter molecule can be a radioisotope, such as H, C, P, S, or I; a fluorescent or chemiluminescent moiety such as fluorescein isothiocyanate, or rhodamine; or an enzyme such as alkaline phosphatase, β-galactosidase, horseradish peroxidase, or luciferase. Specific exemplary assays that can be used to detect or measure SARS-COV-2 in a sample include enzyme-linked immunosorbent assay (ELISA), radioimmunoassay (RIA), and fluorescence-activated cell sorting (FACS).

[0227] In another aspect, this disclosure further provides a method for detecting the presence of SARS COV-2 in a sample comprising the steps of: (i) contacting a sample with the antibody or antigen-binding fragment thereof described herein; and (ii) determining binding of the antibody or antigen-binding fragment to one or more SARS COV-2 antigens, wherein binding of the antibody to the one or more SARS COV-2 antigens is indicative of the presence of SARS COV-2 in the sample.

[0228] In some embodiments, the SARS-COV-2 antigen comprises the N-terminal domain (NTD) of the S polypeptide. In some embodiments, the SARS-COV-2 antigen comprises the supersite b-hairpin (residues 152-158), the β8-strand (residue 97-102), N4-loop (residues 178-188), and/or N-linked glycans at positions N122 and N149 of the S polypeptide. In some embodiments, the SARS-CoV-2 antigen comprises residues 27-32, 57-60, 210-218, and/or 286-303 of the S polypeptide. In some embodiments, the SARS-COV-2 antigen comprises residues 600-606 of the S polypeptide.

[0229] In some embodiments, the antibody or antigen-binding fragment thereof is conjugated to a label. In some embodiments, the step of detecting comprises contacting a secondary antibody with the antibody or antigen-binding fragment thereof and wherein the secondary antibody comprises a label. In some embodiments, the label includes a fluorescent label, a chemiluminescent label, a radiolabel, and an enzyme.

[0230] In some embodiments, the step of detecting comprises detecting fluorescence or chemiluminescence. In some embodiments, the step of detecting comprises a competitive binding assay or ELISA.

[0231] In some embodiments, the method further comprises binding the sample to a solid support. In some embodiments, the solid support includes microparticles, microbeads, magnetic beads, and an affinity purification column.

[0232] Samples that can be used in SARS-COV-2 diagnostic assays according to the present invention include any tissue or fluid sample obtainable from a patient, which contains detectable quantities of either SARS-COV-2 protein, or fragments thereof, under normal or pathological conditions. Generally, levels of SARS-COV-2 protein in a particular sample obtained from a healthy patient (e.g., a patient not afflicted with a disease associated with SARS-COV-2) will be measured to initially establish a baseline, or standard, level of SARS-COV-2. This baseline level of SARS-COV-2 can then be compared against the levels of SARS-COV-2 measured in samples obtained from individuals suspected of having a SARS-COV-2-associated condition or symptoms associated with such condition.

[0233] The antibodies specific for SARS-COV-2 protein may contain no additional labels or moieties, or they may contain an N-terminal or C-terminal label or moiety. In one embodiment, the label or moiety is biotin. In a binding assay, the location of a label (if any) may determine the orientation of the peptide relative to the surface upon which the peptide is bound. For example, if a surface is coated with avidin, a peptide containing a N-terminal biotin will be oriented such that the C-terminal portion of the peptide will be distal to the surface.

### Definitions

[0234] To aid in understanding the detailed description of the compositions and methods according to the disclosure, a few express definitions are provided to facilitate an unambiguous disclosure of the various aspects of the disclosure. Unless otherwise defined, all technical and scientific terms used herein have the same meaning as commonly understood by one of ordinary skill in the art to which this disclosure belongs.

[0235] A “neutralizing antibody” is one that can neutralize the ability of that pathogen to initiate and/or perpetuate an infection in a host and/or in target cells in vitro. “Broadly neutralizing anti-SARS-COV-2 antibodies” refer to antibodies that neutralize more than one SARS-COV-2 virus strains/variants in a neutralization assay. A broad neutralizing anti-SARS-COV-2 antibody may neutralize at least 2, 3, 4, 5, 6, 7, 8, 9 or more different strains/variants of SARS-COV-2.

[0236] The term “antibody” as referred to herein includes whole antibodies and any antigen-binding fragment or single chains thereof. Whole antibodies are glycoproteins comprising at least two heavy (H) chains and two light (L) chains inter-connected by disulfide bonds. Each heavy chain is comprised of a heavy chain variable region (abbreviated herein as VH) and a heavy chain constant region. The heavy chain constant region is comprised of three domains, CH1, CH2, and CH3. Each light chain is comprised of a light chain variable region (abbreviated herein as VL) and a light chain constant region. The light chain constant region is comprised of one domain, CL. The VH and VL regions can be further subdivided into regions of hypervariability, termed complementarity determining regions (CDR), interspersed with regions that are more conserved, termed framework regions (FR). Each VH and VL is composed of three CDRs and four FRs, arranged from amino-terminus to carboxy-terminus in the following order: FR1, CDR1, FR2, CDR2, FR3, CDR3, FR4. The heavy chain variable region CDRs and FRs are HFR1, HCDR1, HFR2, HCDR2, HFR3, HCDR3, HFR4. The light chain variable region CDRs and FRs are LFR1, LCDR1, LFR2, LCDR2, LFR3, LCDR3, LFR4. The variable regions of the heavy and light chains contain a binding domain that interacts with an antigen. The constant regions of the antibodies can mediate the binding of the immunoglobulin to host tissues or factors, including various cells of the immune system (e.g., effector cells) and the first component (CIq) of the classical complement system.

[0237] The term “antigen-binding fragment or portion” of an antibody (or simply “antibody fragment or portion”), as used herein, refers to one or more fragments of an antibody that retain the ability to specifically bind to an antigen (e.g., a spike or S protein of SARS-COV-2 virus). It has been shown that the antigen-binding function of an antibody can be performed by fragments of a full-length antibody. Examples of binding fragments encompassed within the term “antigen-binding fragment or portion” of an antibody include (i) a Fab fragment, a monovalent fragment consisting of the VL, VH, CL, and CH1 domains; (ii) a F(ab′) 2 fragment, a bivalent fragment comprising two Fab fragments linked by a disulfide bridge at the hinge region; (iii) a Fab′ fragment, which is essentially a Fab with part of the hinge region (see, FUNDAMENTAL IMMUNOLOGY (Paul ed., 3rd ed. 1993)); (iv) a Fd fragment consisting of the VH and CH1 domains; (v) a Fv fragment consisting of the VL and VH domains of a single arm of an antibody, (vi) a dAb fragment (Ward et al., (1989) Nature 341:544-546), which consists of a VH domain; (vii) an isolated CDR; and (viii) a nanobody, a heavy chain variable region containing a single variable domain and two constant domains. Furthermore, although the two domains of the Fv fragment, VL and VH, are coded for by separate genes, they can be joined, using recombinant methods, by a synthetic linker that enables them to be made as a single protein chain in which the VL and VH regions pair to form monovalent molecules (known as single chain Fv or scFv); see, e.g., Bird et al. (1988) Science 242:423-426; and Huston et al. (1988) Proc. Natl. Acad. Sci. USA 85:5879-5883). Such single chain antibodies are also intended to be encompassed within the term “antigen-binding fragment or portion” of an antibody. These antibody fragments are obtained using conventional techniques known to those with skill in the art, and the fragments are screened for utility in the same manner as are intact antibodies.

[0238] An “isolated antibody,” as used herein, is intended to refer to an antibody that is substantially free of other antibodies having different antigenic specificities (e.g., an isolated antibody that specifically binds to a spike or S protein of SARS-COV-2 virus is substantially free of antibodies that specifically bind antigens other than the neuraminidase). An isolated antibody can be substantially free of other cellular material and/or chemicals.

[0239] The terms “monoclonal antibody” or “monoclonal antibody composition” as used herein refer to a preparation of antibody molecules of single molecular composition. A monoclonal antibody composition displays a single binding specificity and affinity for a particular epitope.

[0240] The term “human antibody” is intended to include antibodies having variable regions in which both the framework and CDR regions are derived from human germline immunoglobulin sequences. Furthermore, if the antibody contains a constant region, the constant region also is derived from human germline immunoglobulin sequences. The human antibodies of the invention can include amino acid residues not encoded by human germline immunoglobulin sequences (e.g., mutations introduced by random or site-specific mutagenesis in vitro or by somatic mutation in vivo). However, the term “human antibody,” as used herein, is not intended to include antibodies in which CDR sequences derived from the germline of another mammalian species, such as a mouse, have been grafted onto human framework sequences.

[0241] The term “human monoclonal antibody” refers to antibodies displaying a single binding specificity, which have variable regions in which both the framework and CDR regions are derived from human germline immunoglobulin sequences. In one embodiment, the human monoclonal antibodies can be produced by a hybridoma that includes a B cell obtained from a transgenic nonhuman animal, e.g., a transgenic mouse, having a genome comprising a human heavy chain transgene and a light chain transgene fused to an immortalized cell.

[0242] The term “recombinant human antibody,” as used herein, includes all human antibodies that are prepared, expressed, created, or isolated by recombinant means, such as (a) antibodies isolated from an animal (e.g., a mouse) that is transgenic or transchromosomal for human immunoglobulin genes or a hybridoma prepared therefrom (described further below), (b) antibodies isolated from a host cell transformed to express the human antibody, e.g., from a transfectoma, (c) antibodies isolated from a recombinant, combinatorial human antibody library, and (d) antibodies prepared, expressed, created or isolated by any other means that involve splicing of human immunoglobulin gene sequences to other DNA sequences. Such recombinant human antibodies have variable regions in which the framework and CDR regions are derived from human germline immunoglobulin sequences. In some embodiments, however, such recombinant human antibodies can be subjected to in vitro mutagenesis (or, when an animal transgenic for human Ig sequences is used, in vivo somatic mutagenesis) and thus the amino acid sequences of the VH and VL regions of the recombinant antibodies are sequences that, while derived from and related to human germline VH and VL sequences, may not naturally exist within the human antibody germline repertoire in vivo.

[0243] The term “isotype” refers to the antibody class (e.g., IgM or IgG1) that is encoded by the heavy chain constant region genes. The phrases “an antibody recognizing an antigen” and “an antibody specific for an antigen” are used interchangeably herein with the term “an antibody which binds specifically to an antigen.”

[0244] The term “human antibody derivatives” refers to any modified form of the human antibody, e.g., a conjugate of the antibody and another agent or antibody. The term “humanized antibody” is intended to refer to antibodies in which CDR sequences derived from the germline of another mammalian species, such as a mouse, have been grafted onto human framework sequences. Additional framework region modifications can be made within the human framework sequences.

[0245] The term “chimeric antibody” is intended to refer to antibodies in which the variable region sequences are derived from one species, and the constant region sequences are derived from another species, such as an antibody in which the variable region sequences are derived from a mouse antibody, and the constant region sequences are derived from a human antibody. The term can also refer to an antibody in which its variable region sequence or CDR(s) is derived from one source (e.g., an IgA1 antibody), and the constant region sequence or Fc is derived from a different source (e.g., a different antibody, such as an IgG, IgA2, IgD, IgE or IgM antibody).

[0246] The invention encompasses isolated or substantially purified nucleic acids, peptides, polypeptides, or proteins. In the context of the present invention, an “isolated” nucleic acid, DNA or RNA molecule or an “isolated” polypeptide is a nucleic acid, DNA molecule, RNA molecule, or polypeptide that exists apart from its native environment and is therefore not a product of nature. An isolated nucleic acid, DNA molecule, RNA molecule, or polypeptide may exist in a purified form or may exist in a non-native environment such as, for example, a transgenic host cell. A “purified” nucleic acid molecule, peptide, polypeptide, or protein, or a fragment thereof, is substantially free of other cellular material, or culture medium when produced by recombinant techniques, or substantially free of chemical precursors or other chemicals when chemically synthesized. In one embodiment, an “isolated” nucleic acid is free of sequences that naturally flank the nucleic acid (i.e., sequences located at the 5′ and 3′ ends of the nucleic acid) in the genomic DNA of the organism from which the nucleic acid is derived. For example, in various embodiments, the isolated nucleic acid molecule can contain less than about 5 kb, 4 kb, 3 kb, 2 kb, 1 kb, 0.5 kb, or 0.1 kb of nucleotide sequences that naturally flank the nucleic acid molecule in genomic DNA of the cell from which the nucleic acid is derived. A protein, peptide, or polypeptide that is substantially free of cellular material includes preparations of protein, peptide, or polypeptide having less than about 30%, 20%, 10%, or 5% (by dry weight) of contaminating protein. When the protein of the invention, or biologically active portion thereof, is recombinantly produced, preferably culture medium represents less than about 30%, 20%, 10%, or 5% (by dry weight) of chemical precursors or non-protein-of-interest chemicals.

[0247] The terms “polypeptide,” “peptide,” and “protein” are used interchangeably herein to refer to polymers of amino acids of any length. The polymer may be linear or branched, it may comprise modified amino acids, and it may be interrupted by non-amino acids. The terms also encompass an amino acid polymer that has been modified; for example, disulfide bond formation, glycosylation, lipidation, acetylation, phosphorylation, pegylation, or any other manipulation, such as conjugation with a labeling component. As used herein, the term “amino acid” includes natural and/or unnatural or synthetic amino acids, including glycine and both the D or L optical isomers, and amino acid analogs and peptidomimetics.

[0248] A peptide or polypeptide “fragment” as used herein refers to a less than full-length peptide, polypeptide, or protein. For example, a peptide or polypeptide fragment can have is at least about 3, at least about 4, at least about 5, at least about 10, at least about 20, at least about 30, at least about 40 amino acids in length, or single unit lengths thereof. For example, fragment may be 6, 7, 8, 9, 10, 11, 12, 13, 14, 15, 16, 17, or more amino acids in length. There is no upper limit to the size of a peptide fragment. However, in some embodiments, peptide fragments can be less than about 500 amino acids, less than about 400 amino acids, less than about 300 amino acids, or less than about 250 amino acids in length. Preferably the peptide fragment can elicit an immune response when used to inoculate an animal. A peptide fragment may be used to elicit an immune response by inoculating an animal with a peptide fragment in combination with an adjuvant, a peptide fragment that is coupled to an adjuvant, or a peptide fragment that is coupled to arsanilic acid, sulfanilic acid, an acetyl group, or a picryl group. A peptide fragment can include a non-amide bond and can be a peptidomimetic.

[0249] As used herein, the term “conjugate” or “conjugation” or “linked” as used herein refers to the attachment of two or more entities to form one entity. A conjugate encompasses both peptide-small molecule conjugates as well as peptide-protein/peptide conjugates.

[0250] The term “recombinant,” as used herein, refers to antibodies or antigen-binding fragments thereof of the invention created, expressed, isolated, or obtained by technologies or methods known in the art as recombinant DNA technology, which include, e.g., DNA splicing and transgenic expression. The term refers to antibodies expressed in a non-human mammal (including transgenic non-human mammals, e.g., transgenic mice), or a cell (e.g., CHO cells) expression system or isolated from a recombinant combinatorial human antibody library.

[0251] A “nucleic acid” or “polynucleotide” refers to a DNA molecule (for example, but not limited to, a cDNA or genomic DNA) or an RNA molecule (for example, but not limited to, an mRNA), and includes DNA or RNA analogs. A DNA or RNA analog can be synthesized from nucleotide analogs. The DNA or RNA molecules may include portions that are not naturally occurring, such as modified bases, modified backbone, deoxyribonucleotides in an RNA, etc. The nucleic acid molecule can be single-stranded or double-stranded.

[0252] The term “substantial identity” or “substantially identical,” when referring to a nucleic acid or fragment thereof, indicates that, when optimally aligned with appropriate nucleotide insertions or deletions with another nucleic acid (or its complementary strand), there is nucleotide sequence identity in at least about 90%, and more preferably at least about 95%, 96%, 97%, 98% or 99% of the nucleotide bases, as measured by any well-known algorithm of sequence identity, such as FASTA, BLAST or GAP, as discussed below. A nucleic acid molecule having substantial identity to a reference nucleic acid molecule may, in certain instances, encode a polypeptide having the same or substantially similar amino acid sequence as the polypeptide encoded by the reference nucleic acid molecule.

[0253] As applied to polypeptides, the term “substantial similarity” or “substantially similar” means that two peptide sequences, when optimally aligned, such as by the programs GAP or BESTFIT using default gap weights, share at least 90% sequence identity, even more preferably at least 95%, 98% or 99% sequence identity. Preferably, residue positions, which are not identical, differ by conservative amino acid substitutions. A “conservative amino acid substitution” is one in which an amino acid residue is substituted by another amino acid residue having a side chain (R group) with similar chemical properties (e.g., charge or hydrophobicity). In general, a conservative amino acid substitution will not substantially change the functional properties of a protein. In cases where two or more amino acid sequences differ from each other by conservative substitutions, the percent or degree of similarity may be adjusted upwards to correct for the conservative nature of the substitution. Means for making this adjustment are well known to those of skill in the art. See, e.g., Pearson (1994) Methods Mol. Biol. 24:307-331, which is herein incorporated by reference. Examples of groups of amino acids that have side chains with similar chemical properties include 1) aliphatic side chains: glycine, alanine, valine, leucine, and isoleucine; 2) aliphatic-hydroxyl side chains: serine and threonine; 3)amide-containing side chains: asparagine and glutamine; 4) aromatic side chains: phenylalanine, tyrosine, and tryptophan; 5) basic side chains: lysine, arginine, and histidine; 6) acidic side chains: aspartate and glutamate, and 7) sulfur-containing side chains: cysteine and methionine. Preferred conservative amino acids substitution groups are: valine-leucine-isoleucine, phenylalanine-tyrosine, lysine-arginine, alanine-valine, glutamate-aspartate, and asparagine-glutamine. Alternatively, a conservative replacement is any change having a positive value in the PAM250 log-likelihood matrix disclosed in Gonnet et al. (1992) Science 256:1443 45, herein incorporated by reference. A “moderately conservative” replacement is any change having a nonnegative value in the PAM250 log-likelihood matrix.

[0254] Sequence similarity for polypeptides is typically measured using sequence analysis software. Protein analysis software matches similar sequences using measures of similarity assigned to various substitutions, deletions, and other modifications, including conservative amino acid substitutions. For instance, GCG software contains programs such as GAP and BESTFIT, which can be used with default parameters to determine sequence homology or sequence identity between closely related polypeptides, such as homologous polypeptides from different species of organisms or between a wild type protein and a mutein thereof. See, e.g., GCG Version 6.1. Polypeptide sequences also can be compared using FASTA with default or recommended parameters; a program in GCG Version 6.1. FASTA (e.g., FASTA2 and FASTA3) provides alignments and percent sequence identity of the regions of the best overlap between the query and search sequences (Pearson (2000) supra). Another preferred algorithm when comparing a sequence of the invention to a database containing a large number of sequences from different organisms is the computer program BLAST, especially BLASTP or TBLASTN, using default parameters. See, e.g., Altschul et al. (1990) J. Mol. Biol. 215:403-410 and (1997) Nucleic Acids Res. 25:3389-3402, each of which is herein incorporated by reference.

[0255] As used herein, the term “affinity” refers to the strength of the sum total of noncovalent interactions between a single binding site of a molecule (e.g., an antibody) and its binding partner (e.g., an antigen). Unless indicated otherwise, as used herein, “binding affinity” refers to intrinsic binding affinity, which reflects a 1:1 interaction between members of a binding pair (e.g., antibody and antigen). The affinity of a molecule X for its partner Y can generally be represented by the dissociation constant (KD). Affinity can be measured by common methods known in the art, including those described herein.

[0256] The term “specifically binds,” or “binds specifically to,” or the like, refers to an antibody that binds to a single epitope, e.g., under physiologic conditions., but which does not bind to more than one epitope. Accordingly, an antibody that specifically binds to a polypeptide will bind to an epitope that is present on the polypeptide, but which is not present on other polypeptides. Specific binding can be characterized by an equilibrium dissociation constant of at least about 1×10-8 M or less (e.g., a smaller KD denotes a tighter binding). Methods for determining whether two molecules specifically bind are well known in the art and include, for example, equilibrium dialysis, surface plasmon resonance, and the like. As described herein, antibodies have been identified by surface plasmon resonance, e.g., BIACORE™, which bind specifically to a spike or S protein of a SARS-COV-2 virus.

[0257] Preferably, the antibody binds to a spike or S protein with “high affinity,” namely with a KD of 1×10-7 M or less, more preferably 5×10-8 M or less, more preferably 3×10-8 M or less, more preferably 1×10-8 M or less, more preferably 5×10-9 M or less or even more preferably 1×10-9 M or less, as determined by surface plasmon resonance, e.g., BIACORE. The term “does not substantially bind” to a protein or cells, as used herein, means does not bind or does not bind with a high affinity to the protein or cells, i.e., binds to the protein or cells with a KD of 1×10-6 M or more, more preferably 1×10-5 M or more, more preferably 1×10-4 M or more, more preferably 1×10-3 M or more, even more preferably 1×10-2 M or more.

[0258] The term “Kassoc” or “Ka,” as used herein, is intended to refer to the association rate of a particular antibody-antigen interaction, whereas the term “Kdis” or “Kd,” as used herein, is intended to refer to the dissociation rate of a particular antibody-antigen interaction. The term “KD,” as used herein, is intended to refer to the dissociation constant, which is obtained from the ratio of Kd to Ka (i.e., Kd/Ka) and is expressed as a molar concentration (M). KD values for antibodies can be determined using methods well established in the art. A preferred method for determining the KD of an antibody is by using surface plasmon resonance, preferably using a biosensor system such as a BIACORE system.

[0259] Antibodies that “compete with another antibody for binding to a target” refer to antibodies that inhibit (partially or completely) the binding of the other antibody to the target. Whether two antibodies compete with each other for binding to a target, i.e., whether and to what extent one antibody inhibits the binding of the other antibody to a target, may be determined using known competition experiments. In some embodiments, an antibody competes with, and inhibits binding of another antibody to a target by at least 10%, 20%, 30%, 40%, 50%, 60%, 70%, 80%, 90% or 100%. The level of inhibition or competition may be different depending on which antibody is the “blocking antibody” (i.e., the cold antibody that is incubated first with the target). Competition assays can be conducted as described, for example, in Ed Harlow and David Lane, Cold Spring Harb Protoc; 2006 or in Chapter 11 of “Using Antibodies” by Ed Harlow and David Lane, Cold Spring Harbor Laboratory Press, Cold Spring Harbor, NY, USA 1999. Competing antibodies bind to the same epitope, an overlapping epitope or to adjacent epitopes (e.g., as evidenced by steric hindrance). Other competitive binding assays include: solid phase direct or indirect radioimmunoassay (RIA), solid phase direct or indirect enzyme immunoassay (EIA), sandwich competition assay (see Stahli et al., Methods in Enzymology 9:242 (1983)); solid phase direct biotin-avidin EIA (see Kirkland et al., J. Immunol. 137:3614 (1986)); solid phase direct labeled assay, solid phase direct labeled sandwich assay (see Harlow and Lane, Antibodies: A Laboratory Manual, Cold Spring Harbor Press (1988)); solid phase direct label RIA using 1-125 label (see Morel et al., Mol. Immunol. 25 (1): 7 (1988)); solid phase direct biotin-avidin EIA (Cheung et al., Virology 176:546 (1990)); and direct labeled RIA. (Moldenhauer et al., Scand. J. Immunol. 32:77 (1990)).

[0260] The term “epitope” as used herein refers to an antigenic determinant that interacts with a specific antigen-binding site in the variable region of an antibody molecule known as a paratope. A single antigen may have more than one epitope. Thus, different antibodies may bind to different areas on an antigen and may have different biological effects. The term “epitope” also refers to a site on an antigen to which B and/or T cells respond. It also refers to a region of an antigen that is bound by an antibody. Epitopes may be defined as structural or functional. Functional epitopes are generally a subset of the structural epitopes and have those residues that directly contribute to the affinity of the interaction. Epitopes may also be conformational, that is, composed of nonlinear amino acids. In some embodiments, epitopes may include determinants that are chemically active surface groupings of molecules such as amino acids, sugar side chains, phosphoryl groups, or sulfonyl groups, and, In some embodiments, may have specific three-dimensional structural characteristics, and/or specific charge characteristics. An epitope typically includes at least 3, 4, 5, 6, 7, 8, 9, 10, 11, 12, 13, 14, or 15 amino acids in a unique spatial conformation. Methods for determining what epitopes are bound by a given antibody (i.e., epitope mapping) are well known in the art and include, for example, immunoblotting and immune-precipitation assays, wherein overlapping or contiguous peptides from a spike or S protein are tested for reactivity with a given antibody. Methods of determining spatial conformation of epitopes include techniques in the art and those described herein, for example, x-ray crystallography and 2-dimensional nuclear magnetic resonance (see, e.g., Epitope Mapping Protocols in Methods in Molecular Biology, Vol. 66, G. E. Morris, Ed. (1996)).

[0261] The term “epitope mapping” refers to the process of identification of the molecular determinants for antibody-antigen recognition.

[0262] The term “binds to an epitope” or “recognizes an epitope” with reference to an antibody or antibody fragment refers to continuous or discontinuous segments of amino acids within an antigen. Those of skill in the art understand that the terms do not necessarily mean that the antibody or antibody fragment is in direct contact with every amino acid within an epitope sequence.

[0263] The term “binds to the same epitope” with reference to two or more antibodies means that the antibodies bind to the same, overlapping, or encompassing continuous or discontinuous segments of amino acids. Those of skill in the art understand that the phrase “binds to the same epitope” does not necessarily mean that the antibodies bind to or contact exactly the same amino acids. The precise amino acids that the antibodies contact can differ. For example, a first antibody can bind to a segment of amino acids that is completely encompassed by the segment of amino acids bound by a second antibody. In another example, a first antibody binds one or more segments of amino acids that significantly overlap the one or more segments bound by the second antibody. For the purposes herein, such antibodies are considered to “bind to the same epitope.”

[0264] As used herein, the term “immune response” refers to a biological response within a vertebrate against foreign agents, which response protects the organism against these agents and diseases caused by them. An immune response is mediated by the action of a cell of the immune system (for example, a T lymphocyte, B lymphocyte, natural killer (NK) cell, macrophage, eosinophil, mast cell, dendritic cell, or neutrophil) and soluble macromolecules produced by any of these cells or the liver (including antibodies, cytokines, and complement) that results in selective targeting, binding to, damage to, destruction of, and/or elimination from the vertebrate's body of invading pathogens, cells or tissues infected with pathogens, cancerous or other abnormal cells, or, in cases of autoimmunity or pathological inflammation, normal human cells or tissues. An immune reaction includes, e.g., activation or inhibition of a T cell, e.g., an effector T cell or a Th cell, such as a CD4+ or CD8+ T cell, or the inhibition of a Treg cell.

[0265] The term “detectable label” as used herein refers to a molecule capable of detection, including, but not limited to, radioactive isotopes, fluorescers, chemiluminescers, chromophores, enzymes, enzyme substrates, enzyme cofactors, enzyme inhibitors, chromophores, dyes, metal ions, metal sols, ligands (e.g., biotin, avidin, streptavidin or haptens), intercalating dyes and the like. The term “fluorescer” refers to a substance or a portion thereof that is capable of exhibiting fluorescence in the detectable range.

[0266] In many embodiments, the terms “subject” and “patient” are used interchangeably irrespective of whether the subject has or is currently undergoing any form of treatment. As used herein, the terms “subject” and “subjects” may refer to any vertebrate, including, but not limited to, a mammal (e.g., cow, pig, camel, llama, horse, goat, rabbit, sheep, hamsters, guinea pig, cat, dog, rat, and mouse, a non-human primate (for example, a monkey, such as a cynomolgus monkey, chimpanzee, etc.) and a human). The subject may be a human or a non-human. In more exemplary aspects, the mammal is a human. As used herein, the expression “a subject in need thereof” or “a patient in need thereof” means a human or non-human mammal that exhibits one or more symptoms or indications of disorders (e.g., neuronal disorders, autoimmune diseases, and cardiovascular diseases), and/or who has been diagnosed with inflammatory disorders. In some embodiments, the subject is a mammal. In some embodiments, the subject is human.

[0267] As used herein, the term “disease” is intended to be generally synonymous and is used interchangeably with the terms “disorder” and “condition” (as in medical condition), in that all reflect an abnormal condition (e.g., inflammatory disorder) of the human or animal body or of one of its parts that impairs normal functioning, is typically manifested by distinguishing signs and symptoms, and causes the human or animal to have a reduced duration or quality of life.

[0268] As used herein, the term “treating” or “treatment” of any disease or disorder refers in one embodiment, to ameliorating the disease or disorder (i.e., arresting or reducing the development of the disease or at least one of the clinical symptoms thereof). In another embodiment, “treating” or “treatment” refers to ameliorating at least one physical parameter, which may not be discernible by the patient. In yet another embodiment, “treating” or “treatment” refers to modulating the disease or disorder, either physically, (e.g., stabilization of a discernible symptom), physiologically, (e.g., stabilization of a physical parameter), or both. In yet another embodiment, “treating” or “treatment” refers to preventing or delaying the onset or development or progression of the disease or disorder.

[0269] The terms “prevent,” “preventing,” “prevention,” “prophylactic treatment” and the like refer to reducing the probability of developing a disorder or condition in a subject, who does not have, but is at risk of or susceptible to developing a disorder or condition.

[0270] The terms “decrease,” “reduced,” “reduction,” “decrease,” or “inhibit” are all used herein generally to mean a decrease by a statistically significant amount. However, for avoidance of doubt, “reduced,” “reduction,” “decrease,” or “inhibit” means a decrease by at least 10% as compared to a reference level, for example, a decrease by at least about 20%, or at least about 30%, or at least about 40%, or at least about 50%, or at least about 60%, or at least about 70%, or at least about 80%, or at least about 90% or up to and including a 100% decrease (e.g., absent level as compared to a reference sample), or any decrease between 10-100% as compared to a reference level.

[0271] As used herein, the term “agent” denotes a chemical compound, a mixture of chemical compounds, a biological macromolecule (such as a nucleic acid, an antibody, a protein or portion thereof, e.g., a peptide), or an extract made from biological materials such as bacteria, plants, fungi, or animal (particularly mammalian) cells or tissues. The activity of such agents may render it suitable as a “therapeutic agent,” which is a biologically, physiologically, or pharmacologically active substance (or substances) that acts locally or systemically in a subject.

[0272] As used herein, the terms “therapeutic agent,” “therapeutic capable agent,” or “treatment agent” are used interchangeably and refer to a molecule or compound that confers some beneficial effect upon administration to a subject. The beneficial effect includes enablement of diagnostic determinations; amelioration of a disease, symptom, disorder, or pathological condition; reducing or preventing the onset of a disease, symptom, disorder, or condition; and generally counteracting a disease, symptom, disorder or pathological condition.

[0273] The term “therapeutic effect” is art-recognized and refers to a local or systemic effect in animals, particularly mammals, and more particularly humans caused by a pharmacologically active substance.

[0274] The term “effective amount,” “effective dose,” or “effective dosage” is defined as an amount sufficient to achieve or at least partially achieve a desired effect. A “therapeutically effective amount” or “therapeutically effective dosage” of a drug or therapeutic agent is any amount of the drug that, when used alone or in combination with another therapeutic agent, promotes disease regression evidenced by a decrease in severity of disease symptoms, an increase in frequency and duration of disease symptom-free periods, or a prevention of impairment or disability due to the disease affliction. A “prophylactically effective amount” or a “prophylactically effective dosage” of a drug is an amount of the drug that, when administered alone or in combination with another therapeutic agent to a subject at risk of developing a disease or of suffering a recurrence of disease, inhibits the development or recurrence of the disease. The ability of a therapeutic or prophylactic agent to promote disease regression or inhibit the development or recurrence of the disease can be evaluated using a variety of methods known to the skilled practitioner, such as in human subjects during clinical trials, in animal model systems predictive of efficacy in humans, or by assaying the activity of the agent in in vitro assays.

[0275] Doses are often expressed in relation to bodyweight. Thus, a dose which is expressed as [g, mg, or other unit]/kg (or g, mg etc.) usually refers to [g, mg, or other unit] “per kg (or g, mg etc.) bodyweight,” even if the term “bodyweight” is not explicitly mentioned.

[0276] As used herein, the term “composition” or “pharmaceutical composition” refers to a mixture of at least one component useful within the invention with other components, such as carriers, stabilizers, diluents, dispersing agents, suspending agents, thickening agents, and/or excipients. The pharmaceutical composition facilitates administration of one or more components of the invention to an organism.

[0277] As used herein, the term “pharmaceutically acceptable” refers to a material, such as a carrier or diluent, which does not abrogate the biological activity or properties of the composition, and is relatively non-toxic, i.e., the material may be administered to an individual without causing undesirable biological effects or interacting in a deleterious manner with any of the components of the composition in which it is contained.

[0278] As used herein, the term “pharmaceutically acceptable carrier” includes a pharmaceutically acceptable salt, pharmaceutically acceptable material, composition or carrier, such as a liquid or solid filler, diluent, excipient, solvent or encapsulating material, involved in carrying or transporting a compound(s) of the present invention within or to the subject such that it may perform its intended function. Typically, such compounds are carried or transported from one organ, or portion of the body, to another organ, or portion of the body. Each salt or carrier must be “acceptable” in the sense of being compatible with the other ingredients of the formulation and not injurious to the subject. Some examples of materials that may serve as pharmaceutically acceptable carriers include: sugars, such as lactose, glucose, and sucrose; starches, such as corn starch and potato starch; cellulose, and its derivatives, such as sodium carboxymethyl cellulose, ethyl cellulose, and cellulose acetate; powdered tragacanth; malt; gelatin; talc; excipients, such as cocoa butter and suppository waxes; oils, such as peanut oil, cottonseed oil, safflower oil, sesame oil, olive oil, corn oil, and soybean oil; glycols, such as propylene glycol; polyols, such as glycerin, sorbitol, mannitol, and polyethylene glycol; esters, such as ethyl oleate and ethyl laurate; agar; buffering agents, such as magnesium hydroxide and aluminum hydroxide; alginic acid; pyrogen-free water; isotonic saline; Ringer's solution; ethyl alcohol; phosphate buffer solutions; diluent; granulating agent; lubricant; binder; disintegrating agent; wetting agent; emulsifier; coloring agent; release agent; coating agent; sweetening agent; flavoring agent; perfuming agent; preservative; antioxidant; plasticizer; gelling agent; thickener; hardener; setting agent; suspending agent; surfactant; humectant; carrier; stabilizer; and other non-toxic compatible substances employed in pharmaceutical formulations, or any combination thereof. As used herein, “pharmaceutically acceptable carrier” also includes any and all coatings, antibacterial and antifungal agents, and absorption delaying agents, and the like that are compatible with the activity of one or more components of this disclosure, and are physiologically acceptable to the subject. Supplementary active compounds may also be incorporated into the compositions.

[0279] “Combination” therapy, as used herein, unless otherwise clear from the context, is meant to encompass administration of two or more therapeutic agents in a coordinated fashion and includes, but is not limited to, concurrent dosing. Specifically, combination therapy encompasses both co-administration (e.g., administration of a co-formulation or simultaneous administration of separate therapeutic compositions) and serial or sequential administration, provided that administration of one therapeutic agent is conditioned in some way on the administration of another therapeutic agent. For example, one therapeutic agent may be administered only after a different therapeutic agent has been administered and allowed to act for a prescribed period of time. See, e.g., Kohrt et al. (2011) Blood 117:2423.

[0280] As used herein, the term “co-administration” or “co-administered” refers to the administration of at least two agent(s) or therapies to a subject. In some embodiments, the co-administration of two or more agents/therapies is concurrent. In other embodiments, a first agent/therapy is administered prior to a second agent/therapy. Those of skill in the art understand that the formulations and/or routes of administration of the various agents/therapies used may vary.

[0281] As used herein, the term “contacting,” when used in reference to any set of components, includes any process whereby the components to be contacted are mixed into the same mixture (for example, are added into the same compartment or solution), and does not necessarily require actual physical contact between the recited components. The recited components can be contacted in any order or any combination (or sub-combination) and can include situations where one or some of the recited components are subsequently removed from the mixture, optionally prior to addition of other recited components. For example, “contacting A with B and C” includes any and all of the following situations: (i) A is mixed with C, then B is added to the mixture; (ii) A and B are mixed into a mixture; B is removed from the mixture, and then C is added to the mixture; and (iii) A is added to a mixture of B and C.

[0282] “Sample,” “test sample,” and “patient sample” may be used interchangeably herein. The sample can be a sample of serum, urine plasma, amniotic fluid, cerebrospinal fluid, cells, or tissue. Such a sample can be used directly as obtained from a patient or can be pre-treated, such as by filtration, distillation, extraction, concentration, centrifugation, inactivation of interfering components, addition of reagents, and the like, to modify the character of the sample in some manner as discussed herein or otherwise as is known in the art. The terms “sample” and “biological sample” as used herein generally refer to a biological material being tested for and/or suspected of containing an analyte of interest, such as antibodies. The sample may be any tissue sample from the subject. The sample may comprise protein from the subject.

[0283] As used herein, the term “in vitro” refers to events that occur in an artificial environment, e.g., in a test tube or reaction vessel, in cell culture, etc., rather than within a multicellular organism.

[0284] As used herein, the term “in vivo” refers to events that occur within a multicellular organism, such as a non-human animal.

[0285] As used herein, the singular forms “a,” “an,” and “the” include plural references unless the context clearly dictates otherwise.

[0286] As used herein, the terms “including,” “comprising,” “containing,” or “having” and variations thereof are meant to encompass the items listed thereafter and equivalents thereof as well as additional subject matter unless otherwise noted.

[0287] As used herein, the phrases “in one embodiment,” “in various embodiments,” “in some embodiments,” and the like are used repeatedly. Such phrases do not necessarily refer to the same embodiment, but they may unless the context dictates otherwise.

[0288] As used herein, the terms “and/or” or “/” means any one of the items, any combination of the items, or all of the items with which this term is associated.

[0289] As used herein, the word “substantially” does not exclude “completely,” e.g., a composition that is “substantially free” from Y may be completely free from Y. Where necessary, the word “substantially” may be omitted from the definition of the invention.

[0290] As used herein, the term “each,” when used in reference to a collection of items, is intended to identify an individual item in the collection but does not necessarily refer to every item in the collection. Exceptions can occur if explicit disclosure or context clearly dictates otherwise.

[0291] As used herein, the term “approximately” or “about,” as applied to one or more values of interest, refers to a value that is similar to a stated reference value. In some embodiments, the term “approximately” or “about” refers to a range of values that fall within 25%, 20%, 19%, 18%, 17%, 16%, 15%, 14%, 13%, 12%, 11%, 10%, 9%, 8%, 7%, 6%, 5%, 4%, 3%, 2%, 1%, or less in either direction (greater than or less than) of the stated reference value unless otherwise stated or otherwise evident from the context (except where such number would exceed 100% of a possible value). Unless indicated otherwise herein, the term “about” is intended to include values, e.g., weight percents, proximate to the recited range that are equivalent in terms of the functionality of the individual ingredient, the composition, or the embodiment.

[0292] As disclosed herein, a number of ranges of values are provided. It is understood that each intervening value, to the tenth of the unit of the lower limit, unless the context clearly dictates otherwise, between the upper and lower limits of that range is also specifically disclosed. Each smaller range between any stated value or intervening value in a stated range and any other stated or intervening value in that stated range is encompassed within the invention. The upper and lower limits of these smaller ranges may independently be included or excluded in the range, and each range where either, neither, or both limits are included in the smaller ranges is also encompassed within the invention, subject to any specifically excluded limit in the stated range. Where the stated range includes one or both of the limits, ranges excluding either or both of those included limits are also included in the invention.

[0293] The use of any and all examples, or exemplary language (e.g., “such as”) provided herein, is intended merely to better illuminate the invention and does not pose a limitation on the scope of the invention unless otherwise claimed. No language in the specification should be construed as indicating any non-claimed element as essential to the practice of the invention.

[0294] All methods described herein are performed in any suitable order unless otherwise indicated herein or otherwise clearly contradicted by context. In regard to any of the methods provided, the steps of the method may occur simultaneously or sequentially. When the steps of the method occur sequentially, the steps may occur in any order, unless noted otherwise. In cases in which a method comprises a combination of steps, each and every combination or sub-combination of the steps is encompassed within the scope of the disclosure, unless otherwise noted herein.

[0295] Each publication, patent application, patent, and other reference cited herein is incorporated by reference in its entirety to the extent that it is not inconsistent with the present disclosure. Publications disclosed herein are provided solely for their disclosure prior to the filing date of the present invention. Nothing herein is to be construed as an admission that the present invention is not entitled to antedate such publication by virtue of prior invention. Further, the dates of publication provided may be different from the actual publication dates, which may need to be independently confirmed.

[0296] It is understood that the examples and embodiments described herein are for illustrative purposes only and that various modifications or changes in light thereof will be suggested to persons skilled in the art and are to be included within the spirit and purview of this application and scope of the appended claims.

### EXAMPLES

### Example 1

[0297] This example describes the materials, methods, and instrumentation used in EXAMPLE 2.

### Study Participants.

[0298] Samples were obtained from 62 individuals under a study protocol approved by the Rockefeller University in New York from Apr. 1, 2020 to Mar. 26, 2021, as described in Robbiani, D. F. et al. Nature 584, 437-442 (2020); and Wang, Z. et al. Nature 595, 426-431 (2021). All participants provided written informed consent before participation in the study, and the study was conducted in accordance with Good Clinical Practice and clinical data collection. The study was performed in compliance with all relevant ethical regulations, and the protocol was approved by the Institutional Review Board of the Rockefeller University. For detailed participant characteristics, see Supplementary Table 1.

### Blood Samples Processing and Storage.

[0299] Peripheral Blood Mononuclear Cells (PBMCs) obtained from samples collected at Rockefeller University were purified as previously reported by gradient centrifugation and stored in liquid nitrogen in the presence of FCS and DMSO. Heparinized plasma and serum samples were aliquoted and stored at −20° C. or less. Prior to experiments, aliquots of plasma samples were heat-inactivated (56° C. for 1 hour) and then stored at 4° C.

### ELISAs

[0300] ELISAs to evaluate antibodies binding to SARS-COV-2 Wuhan-Hu-1-, Delta-, Gamma, and Omicron-NTD were performed by coating of high-binding 96-half-well plates (Corning 3690) with 50 μl per well of a 1 μg/ml protein solution in PBS overnight at 4° C. Plates were washed 6 times with washing buffer (1×PBS with 0.05% Tween-20 (Sigma-Aldrich)) and incubated with 170 μl per well blocking buffer (1×PBS with 2% BSA and 0.05% Tween-20 (Sigma)) for 1 h at room temperature. Immediately after blocking, monoclonal antibodies or plasma samples were added in PBS and incubated for 1 h at room temperature. Plasma samples were assayed at a 1:66 starting dilution and 7 additional threefold serial dilutions. Monoclonal antibodies were tested at μg/ml starting concentration and 10 additional fourfold serial dilutions. Plates were washed 6 times with washing buffer and then incubated with anti-human IgG, IgM, or IgA secondary antibody conjugated to horseradish peroxidase (HRP) (Jackson Immuno Research 109-036-088 109-035-129 and Sigma A0295) in blocking buffer at a 1:5,000 dilution (IgM and IgG) or 1:3,000 10 dilution (IgA). Plates were developed by addition of the HRP substrate, TMB (ThermoFisher) for 10 min (plasma samples) or 4 minutes (monoclonal antibodies), then the developing reaction was stopped by adding 50 μl 1 M H₂SO₄ and absorbance was measured at 450 nm with an ELISA microplate reader (FluoStar Omega, BMG Labtech) with Omega and Omega MARS software for analysis. For plasma samples, a positive control (plasma from participant COV57, diluted 66.6-fold and seven additional threefold serial dilutions in PBS) was added to every assay plate for validation. The average of its signal was used for normalization of all of the other values on the same plate with Excel software before calculating the area under the curve using Prism V9.1 (GraphPad). For monoclonal antibodies, the EC50 was determined using four-parameter nonlinear regression (GraphPad Prism V9.1).

### Expression of NTD Proteins

[0301] Mammalian expression vectors encoding the SARS-COV-2 Wuhan-Hu-1-NTD (GenBank MN985325.1; S protein residues 14-307), or Delta, Gamma, and Omicron NTD mutants with an N-terminal human IL-2 or Mu phosphatase signal peptide and a C-terminal polyhistidine tag followed by an AviTag were used to express soluble NTD proteins by transiently-transfecting Expi293F cells (GIBCO). After four days, NTD proteins were purified from the supernatants by nickel affinity and size-exclusion chromatography. Peak fractions were identified by SDS-PAGE, and fractions corresponding to monomeric NTDs were pooled and stored at 4° C.

Cell Lines 293T cells (Homo sapiens; sex: female, embryonic kidney) obtained from the ATCC (CRL-3216) and HT1080Ace2 c114 cells (parental HT1080: Homo sapiens; sex: male, fibrosarcoma) (Schmidt, F. et al. J Exp Med 217 (2020).) were cultured in Dulbecco's Modified Eagle Medium (DMEM) supplemented with 10% fetal bovine serum (FBS) at 37° C. and 5% CO₂. VeroE6 cells (Chlorocebus sabaeus; sex: female, kidney epithelial) obtained from the ATCC (CRL-1586™) and from Ralph Baric (University of North Carolina at Chapel Hill), and Caco-2 cells (Homo sapiens; sex: male, colon epithelial) obtained from the ATCC (HTB-37™) were cultured in DMEM supplemented with 1% nonessential amino acids (NEAA) and 10% FBS at 37° C. and 5% CO₂. Expi293F cells (GIBCO) for protein expression were maintained at 37° C. and 8% CO₂ in Expi293 Expression medium (GIBCO), transfected using Expi293 Expression System Kit (GIBCO) and maintained under shaking at 130 rpm. All cell lines have been tested negative for contamination with mycoplasma.

### SARS-COV-2 and Sarbecovirus Spike Protein Pseudotyped Reporter Virus

[0302] Plasmids pSARS-COV-2-SA19 (R683G) and pSARS-COV-SA19 expressing C-terminally truncated SARS-COV-2 and SARS-COV spike proteins and the polymutant PMS20 spike were as described (Schmidt, F. et al. Nature 600, 512-516 (2021).). A panel of plasmids expressing spike proteins from SARS-COV-2 variants were based on pSARS-COV-2-SA19 (R683G) and contain the following substitutions/deletions, Alpha (B.1.1.7): AH69/V70, AY144, N501Y, A470D, D614G, P681H, T761I, S982A, D118H; Beta (B.1.351): D80A, D215G, L242H, R246I, K417N, E484K, N501Y, D614G, A701V; Gamma (P.1): L18F, T20N, P26S, D138Y, R190S, K417T, E484K, N501Y, D614G, H655Y, T1027I, V1167F; Delta (B.1.617.2): T19R, A156-158, L452R, T478K, D614G, P681R, D95ON; Iota (B.1.526): L5F, T95I, D253G, E484K, D614G, A701V; Omicron (B.1.1.529): A67V, 469-70, T95I, G142D, A143-145, 4211, L212I, ins214EPE, G339D, S371L, S373P, S375F, K417N, N440K, G446S, S477N, T478K, E484A, Q493K, G496S, Q498R, N501Y, Y505H, T547K, D614G, H655Y, H679K, P681H, N764K, D796Y, N856K, Q954H, N969H, N969K, L981F. All SARS-COV-2 spike proteins, including variants and the polymutant spike protein PMS20 included the R683G substitution, which disrupts the furin cleavage site and generates higher titer virus stocks without significant effects on pseudotyped virus neutralization sensitivity. SARS-COV-2 pseudotyped particles were generated as previously described. Briefly, 293T cells were transfected with either spike plasmid. Particles were harvested 48 hpt, filtered, and stored at −80C.

### Pseudotyped Virus Neutralization Assay

[0303] Monoclonal antibodies were initially screened at a concentration of 1000 ng/ml to identify those that show >40% neutralization. Antibodies were incubated with SARS-COV-2 Wuhan-Hu-1 or SARS-COV pseudotyped virus for 1 h at 37° C. The mixture was subsequently incubated with HT1080Ace2 c114 cells for 48 h after which cells were washed with PBS and lysed with Luciferase Cell Culture Lysis 5× reagent (Promega). Nanoluc Luciferase activity in lysates was measured using the Nano-Glo Luciferase Assay System (Promega) with the Glomax Navigator (Promega). The obtained relative luminescence units were normalized to those derived from cells infected with the pseudotyped virus in the absence of monoclonal antibodies. Antibodies that showed >40% neutralization at a concentration of 1000 ng/ml were subjected to further titration experiments to determine their IC₅₀ₛ. Antibodies were 4-fold serially diluted and tested against pseudoviruses as detailed above. IC₅₀ₛ were determined using four-parameter nonlinear regression (least-squares regression method without weighting; constraints: top=1, bottom-0) (GraphPad Prism).

### Virus and Virus Titration

[0304] SARS-COV-2 strains USA-WA1/2020 and the South African beta variant B.1.351 were obtained from BEI Resources (catalog no. NR-52281 and NR-54008, respectively). The original WT virus was amplified in Caco-2 cells, which were infected at a multiplicity of infection (MOI) of 0.05 plaque-forming units (PFU)/cell and incubated for 6 days at 37° C. The B.1.351 variant was amplified in VeroE6 cells obtained from the ATCC that were engineered to stably express TMPRSS2 (VeroE6TMPRSS2). VeroE6TMPRSS2 cells were infected at a MOI=0.1 PFU/cell and incubated for 4 days at 33° C. Virus-containing supernatants were subsequently harvested, clarified by centrifugation (3,000 g×10 min), filtered using a disposable vacuum filter system with a 0.22 μm membrane, and stored at −80° C. Virus stock titers were measured by standard plaque assay (PA) on VeroE6 cells obtained from Ralph Baric (referred to as VeroE6UNC). Briefly, 500 μL of serial 10-fold virus dilutions in Opti-MEM were used to infect 4×10⁵ cells seeded the day prior into wells of a 6-well plate. After 1.5 h adsorption, the virus inoculum was removed, and cells were overlayed with DMEM containing 10% FBS with 1.2% microcrystalline cellulose (Avicel). Cells were incubated for 4 days at 33° C., followed by fixation with 7% formaldehyde and crystal violet staining for plaque enumeration. All SARS-COV-2 experiments were performed in a biosafety level 3 laboratory.

[0305] To confirm virus identity and evaluate for unwanted mutations that were acquired during the amplification process, RNA from virus stocks was purified using TRIzol Reagent (ThermoFisher Scientific, catalog no. 15596026). Brief, 200 μL of each virus stock was added to 800 μL TRIzol Reagent, followed by 200 μL chloroform, which was then centrifuged at 12,000 g×5 min. The upper aqueous phase was moved to a new tube, mixed with an equal volume of isopropanol, and then added to a RNeasy Mini Kit column (QIAGEN, catalog no. 74014) to be further purified following the manufacturer's instructions. Viral stocks were subsequently confirmed via next-generation sequencing using libraries for Illumina MiSeq.

### Microscopy-Based Neutralization Assay

[0306] The day prior to infection, VeroE6UNC cells were seeded at 1×10⁴ cells/well into 96-well plates. Antibodies were serially diluted (4-fold) in BA-1, consisting of medium 199 (Lonza, Inc.) supplemented with 1% bovine serum albumin (BSA) and 1× penicillin/streptomycin. Next, the diluted samples were mixed with a constant amount of SARS-COV-2 and incubated for 1 h at 37° C. The antibody-virus-mix was then directly applied to each well (n=3 per dilution) and incubated for 24 h at 37° C. The infectious dose for each virus was pre-determined on VeroE6UNC cells to yield 50-60% antigen-positive cells upon this incubation period (USA-WA1/2020:1,250 PFU/well and B.1.351:175 PFU/well). Cells were subsequently fixed by adding an equal volume of 7% formaldehyde to the wells, followed by permeabilization with 0.1% Triton X-100 for 10 min. After extensive washing, cells were incubated for 1 h at RT with a blocking solution of 5% goat serum in PBS (Jackson ImmunoResearch, catalog no. 005-000-121). A rabbit polyclonal anti-SARS-COV-2 nucleocapsid antibody (GeneTex, catalog no. GTX135357) was added to the cells at 1:1,000 dilution in blocking solution and incubated overnight at 4° C. Next, goat anti-rabbit AlexaFluor 594 (Life Technologies, catalog no. A-11012) was used as a secondary antibody at a dilution of 1:2,000 and incubated overnight at 4° C. Nuclei were stained with Hoechst 33342 (ThermoFisher Scientific, catalog no. 62249) at 1 μg/mL. Images were acquired with a fluorescence microscope and analyzed using ImageXpress Micro XLS (Molecular Devices, Sunnyvale, CA). All statistical analyses were done using Prism 8 software (Graphpad).

### Biotinylation of Viral Protein for Use in Flow Cytometry

[0307] Purified and Avi-tagged SARS-COV-2 NTD was biotinylated using the Biotin-Protein Ligase-BIRA kit according to manufacturer's instructions (Avidity) as described before Robbiani, D. F. et al. Nature 584, 437-442 (2020)). Ovalbumin (Sigma, A5503-1G) was biotinylated using the EZ-Link Sulfo-NHS-LC-Biotinylation kit according to the manufacturer's instructions (Thermo Scientific). Biotinylated ovalbumin was conjugated to streptavidin-BV711 (BD biosciences, 563262) and Gamma NTD to streptavidin-PE (BD Biosciences, 554061) and Wuhan-Hu-1 NTD to streptavidin-AF647 (Biolegend, 405237).

### Flow Cytometry and Single Cell Sorting

[0308] Single cell sorting by flow cytometry was performed as described (Robbiani, D. F. et al. Nature 584, 437-442 (2020)). Briefly, peripheral blood mononuclear cells were enriched for B cells by negative selection using a pan-B-cell isolation kit according to the manufacturer's instructions (Miltenyi Biotec, 130-101-638). The enriched B cells were incubated in FACS buffer (1×PBS, 2% FCS, 1 mM EDTA) with the following anti-human antibodies (all at 1:200 dilution): anti-CD20-PECy7 (BD Biosciences, 335793), anti-CD3-APC-eFluro 780 (Invitrogen, 47-0037-41), anti-CD8-APC-eFluor 780 (Invitrogen, 47-0086-42), anti-CD16-APC-eFluor 780 (Invitrogen, 47-0168-41), anti-CD14-APC-eFluor 780 (Invitrogen, 47-0149-42), as well as Zombie NIR (BioLegend, 423105) and fluorophore-labelled RBD and ovalbumin (Ova) for 30 min on ice. Single CD3-CD8-CD14-CD16-CD20+Ova-Gamma NTD-PE+Wuhan-Hu-1 NTD-AF647+B cells were sorted into individual wells of 96-well plates containing 4 μl of lysis buffer (0.5×PBS, 10 mM DTT, 3,000 units/ml RNasin Ribonuclease Inhibitors (Promega, N2615) per well using a FACS Aria III and FACSDiva software (Becton Dickinson) for acquisition and FlowJo for analysis. The sorted cells were frozen on dry ice and then stored at −80° C. or immediately used for subsequent RNA reverse transcription.

### Antibody Sequencing, Cloning, and Expression

[0309] Antibodies were identified and sequenced as described previously (Robbiani, D. F. et al. Nature 584, 437-442 (2020)). In brief, RNA from single cells was reverse-transcribed (SuperScript III Reverse Transcriptase, Invitrogen, 18080-044), and the cDNA was stored at −20° C. or used for subsequent amplification of the variable IGH, IGL, and IGK genes by nested PCR and Sanger sequencing. Sequence analysis was performed using MacVector. Amplicons from the first PCR reaction were used as templates for sequence- and ligation-independent cloning into antibody expression vectors. Recombinant monoclonal antibodies and Fabs were produced and purified as previously described (Robbiani, D. F. et al. Nature 584, 437-442 (2020)).

### Biolayer Interferometry

[0310] BLI assays were performed on the Octet Red instrument (ForteBio) at 30° C. with shaking at 1,000 r.p.m. Epitope binding assays were performed with protein A biosensor (ForteBio 18-5010), following the manufacturer's protocol “classical sandwich assay.” (1) Sensor check: sensors immersed 30 sec in buffer alone (buffer ForteBio 18-1105). (2) Capture 1st Ab: sensors immersed 10 min with Ab1 at 10 g/mL. (3) Baseline: sensors immersed 30 sec in buffer alone. (4) Blocking: sensors immersed 5 min with IgG isotype control at 10 μg/mL. (6) Antigen association: sensors immersed 5 min with NTD at 10 μg/mL. (7) Baseline: sensors immersed 30 sec in buffer alone. (8) Association Ab2: sensors immersed 5 min with Ab2 at 10 μg/mL. Curve fitting was performed using the Fortebio Octet Data analysis software (ForteBio). Affinity measurement: All measurements of NTD-IgG binding were corrected by subtracting the signal obtained from traces performed with NTD but in the absence of IgG. The kinetic analysis using high precision streptavidin biosensor (ForteBio 18-5118) was performed as follows: (1) baseline: 60 sec immersion in buffer (kinetics buffer 10× ForteBio 18-1105). (2) loading: 200 sec immersion in a solution with biotinylated NTD at 10 μg/mL. (3) baseline: 200 sec immersion in the buffer. (4) Association: 300 sec immersion in solution with IgG at 100 μM or 50 μM or 25 μM (5) dissociation: 600 sec immersion in the buffer. Curve fitting was performed using the Fortebio Octet Data analysis software (ForteBio). Mean KD values were determined by averaging all 3 binding curves that matched the theoretical fit with an R2 value ≥0.8.

### Recombinant Protein Expression for Structural Studies

[0311] Expression and purification of stabilized SARS-COV-2 6P ectodomain was conducted as previously described (Barnes, C. O. et al. Nature 588, 682-687 (2020).). Briefly, constructs encoding the SARS-COV-2 S ectodomain (residues 16-1206 with 6P stabilizing mutations (Hsieh, C. L. et al. Science 369, 1501-1505 (2020)), a mutated furin cleavage site, and C-terminal fold on trimerization motif followed by hexa-His tag) were used to transiently transfect Expi293F cells (Gibco). Four days after transfection, supernatants were harvested, and S 6P proteins were purified by nickel affinity and size-exclusion chromatography. Peak fractions from size-exclusion chromatography were identified by SDS-PAGE, and fractions corresponding to spike trimers were pooled and stored at 4° C. Fabs and IgGs were expressed, purified, and stored as previously described (Barnes, C. O. et al. Nature 588, 682-687 (2020).).

### Cryo-EM Sample Preparation

[0312] Purified Fabs were mixed with SARS-COV-2 S 6P trimer at a 1.1:1 molar ratio of Fab-to-protomer for 30 minutes at room temperature. Fab-S complexes were concentrated to 3-4 mg/mL prior to deposition on a freshly glow-discharged 300 mesh, 1.2/1.3 Quantifoil grid (Electron Microscopy Sciences). Immediately prior to deposition of 3 μL of the complex onto the grid, fluorinated octyl-maltoside (Anatrace) was added to the sample to a final concentration of 0.02% w/v. Samples were vitrified in 100% liquid ethane using a Mark IV Vitrobot (Thermo Fisher) after blotting at 22° C. and 100% humidity for 3s with Whatman No. 1 filter paper.

### Cryo-EM Data Collection and Processing

[0313] Single-particle cryo-EM data were collected on a Titan Krios transmission electron microscope (Thermo Fisher) equipped with a Gatan K3 direct detector, operating at 300 kV and controlled using SerialEM automated data collection software (Mastronarde, D. N. J Struct Biol 152, 36-51 (2005)). A total dose of ˜60 e/Å2 was accumulated on each movie comprising 40 frames with a pixel size of 0.515 Å (C1520-S dataset) or 0.852 Å (C1717-S and C1791-S) and a defocus range of −1.0 and −2.5 μm. Further data collection parameters are summarized in Table 5.

[0314] Movie frame alignment, CTF estimation, particle-picking, and extraction were carried out using cryoSPARC v3.1 (Punjani, A., et al. Nat Methods 14, 290-296 (2017).). Reference-free particle picking and extraction were performed on dose-weighted micrographs curated to remove images with poor CTF fits or signs of crystalline ice. A subset of 4x-downsampled particles was used to generate ab initio models, which were then used for heterogeneous refinement of the entire dataset in cryoSPARC. Particles belonging to classes that resembled Fab-S structures were extracted, downsampled x2, and subjected to 2D classification to select well-defined particle images. 3D classifications (k=6, tau_fudge=4) were carried out using Relion v3.1.1 (Emsley, P., et al. Acta Crystallogr D Biol Crystallogr 66, 486-501) without imposing symmetry and a soft mask. Particles corresponding to selected classes were re-extracted without binning and 3D refinements were carried out using non-uniform refinement in cryoSPARC. Particle stacks were split into individual exposure groups based on the beamtilt angle used for data collection and subjected to per particle CTF refinement and aberration corrections. Another round of non-uniform refinement in cryoSPARC was then performed. For focused classification and local refinements of the Fab VHVL-NTD interface, particles were 3D classified in Relion without alignment using a mask that encompassed the Fab-NTD region. Particles in good 3D classes were then used for local refinement in cryoSPARC. Details of overall resolution and locally-refined resolutions according to the gold-standard Fourier shell correlation of 0.143 criterion (Bell, J. M., et al. Methods 100, 25-34 (2016)) can be found in Table 5.

### Cryo-EM Structure Modeling, Refinement, and Analyses

[0315] Coordinates for initial complexes were generated by docking individual chains from reference structures (see Table 5) into cryo-EM density using UCSF Chimera (Goddard, T. D., et al. J Struct Biol 157, 281-287 (2007)). Initial models for Fabs were generated from coordinates from PDB 6RCO (for C1717 Fab) or PDB 7RKS (for C5120). Models were refined using one round of rigid-body refinement followed by real-space refinement in Phenix (Adams, P. D. et al. Acta Crystallogr D Biol Crystallogr 66, 213-221). Sequence-updated models were built manually in Coot (Emsley, P., et al. Acta Crystallogr D Biol Crystallogr 66, 486-501) and then refined using iterative rounds of refinement in Coot and Phenix. Glycans were modeled at potential N-linked glycosylation sites (PNGSs) in Coot. Validation of model coordinates was performed using MolProbity (Chen, V. B. et al. Acta Crystallogr D Biol Crystallogr 66, 12-21 (2010)). Structure figures were made with UCSF ChimeraX (Goddard, T. D. et al. Protein Sci 27, 14-25 (2018)). Local resolution maps were calculated using cryoSPARC v3.1. Buried surface areas were calculated using PDBePISA (Krissinel, E. & Henrick, K. Journal of molecular biology 372, 774-797 (2007)) and a 1.4 Å probe. Potential hydrogen bonds were assigned as interactions that were <4.0 Å and with A-D-H angle >90°. Potential van der Waals interactions between atoms were assigned as interactions that were <4.0 Å. Hydrogen bond and van der Waals interaction assignments are tentative due to resolution limitations. Spike epitope residues were defined as residues containing atom(s) within 4 Å of a Fab atom for the C1520-S and C1717-S complexes, and defined as spike Ca atoms within 7 Å of a Fab Ca atom for the C1791-S complex.

### Computational Analyses of Antibody Sequences

[0316] Antibody sequences were trimmed based on quality and annotated using Igblastn v.1.14, with IMGT domain delineation system. Annotation was performed systematically using Change-O toolkit v.0.4.540 (Gupta, N. T. et al. Bioinformatics (Oxford, England) 31, 3356-3358 (2015).). Heavy and light chains derived from the same cell were paired, and clonotypes were assigned based on their V and J genes using in-house R and Perl scripts (Figure S4). All scripts and the data used to process antibody sequences are publicly available on GitHub (https://github.com/stratust/igpipeline/tree/igpipeline2_timepoint_v2).

[0317] The frequency distributions of human V genes in anti-SARS-COV-2 antibodies from this study was compared to 131,284,220 IgH and IgL sequences generated by and downloaded from cAb-Rep (Soto, C. et al. Nature 566, 398-402 (2019); Guo, Y., et al. Front Immunol 10, 2365 (2019)), a database of human shared BCR clonotypes available at https://cab-rep.c2b2.columbia.edu/. Based on the 174 distinct V genes that make up the 3085 analyzed sequences from Ig repertoire of the 6 participants present in this study, the IgH and IgL sequences were selected from the database that are partially coded by the same V genes and counted according to the constant region. The frequencies shown in (FIG. 2d and FIG. 10) are relative to the source, and isotype analyzed. The two-sided binomial test was used to check whether the number of sequences belonging to a specific IgHV or IgLV gene in the repertoire is different according to the frequency of the same IgV gene in the database. Adjusted p-values were calculated using the false discovery rate (FDR) correction. Significant differences are denoted with stars.

[0318] Nucleotide somatic hypermutation and CDR3 length were determined using in-house R and Perl scripts. For somatic hypermutations, IGHV and IGLV nucleotide sequences were aligned against their closest germlines using Igblastn, and the number of differences was considered nucleotide mutations. The average mutations for V genes were calculated by dividing the sum of all nucleotide mutations across all participants by the number of sequences used for the analysis. To calculate the GRAVY scores of hydrophobicity (Kyte, J. & Doolittle, R. F. J Mol Biol 157, 105-132 (1982)). The Guy H. R. Hydrophobicity scale based on free energy of transfer (kcal/mole) (Guy, H. R. Biophysical journal 47, 61-70 (1985)) implemented by the R package Peptides (the Comprehensive R Archive Network repository was used; https://journal.r-project.org/archive/2015/RJ-2015-001/RJ-2015-001.pdf). Heavy chain CDR3 amino acid sequences were used from this study, and 22,654,256 IGH CDR3 sequences were obtained from the public database of memory B cell receptor sequences (DeWitt, W. S. et al. PLOS One 11, e0160853 (2016)). The two-tailed Wilcoxon nonparametric test was used to test whether there is a difference in hydrophobicity distribution.

### Example 2

[0319] Several independent studies purified anti-SARS-COV-2 specific B cells from infected or vaccinated individuals using soluble S protein as bait. In all cases, the neutralizing antibodies obtained by this method targeted the RBD more frequently and were generally more potent than those targeting the NTD.

[0320] Further characterization of the neutralizing antibodies to the receptor-binding domain (RBD) showed that infected or vaccinated humans produce a convergent set of neutralizing antibodies dominated by specific Ig heavy chain variable (IGVH) regions. Structural analysis of the interaction between these antibodies and the RBD revealed four classes of anti-RBD antibodies, each of which can interfere with the interaction between this domain and ACE2, the cellular receptor for the SARS-COV-2 S protein. The most frequently occurring anti-RBD antibodies select for resistance mutations in in vitro experiments that are also found in variants of concern. These include residues K417N, E484A, and N501Y found in Omicron, the most recently emerging variant of concern. However, anti-RBD antibodies that remain resistant to these changes evolve in the memory B cell compartment of both naturally infected and vaccinated individuals over time.

[0321] Less is known about anti-NTD antibody responses. In contrast to RBD, anti-NTD neutralizing antibodies obtained to date primarily target a single supersite consisting of variable loops flanked by glycans. Residues in the supersite are mutated in several variants of concern including beta, gamma, and omicron, which carries 3 deletions, 4 amino acid substitutions, and an insertion in the NTD that render antibodies to the supersite infective. Residues in this site are also mutated in the S protein of PMS20, a synthetic construct that is highly antibody resistant. NTD supersite mutations are likely to contribute to the poor plasma neutralizing response to omicron variant in individuals that received 2 doses of currently available vaccines or convalescent individuals exposed to pre-omicron variants of SARS-COV-2. Nevertheless, boosting with currently available mRNA vaccines elicits high levels of plasma omicron neutralizing antibodies, and vaccinated individuals are protected from serious omicron infection. Whether additional anti-NTD omicron neutralizing epitopes exist and how memory B cell anti-NTD neutralizing responses evolve over time are poorly understood.

[0322] To focus on the development and evolution of the human antibody response to NTD, a cohort of SARS-COV-2 convalescent and/or mRNA vaccinated individuals was studied using the isolated NTD domain as a probe to capture memory B cells producing antibodies specific to this domain.

[0323] To examine the development of anti-NTD antibodies, a previously described longitudinal cohort of individuals sampled 1.3 and 12 months after infection was studied, some of whom received an mRNA vaccine approximately 40 days before the 12-month study visit (Table 1). All of the individuals were infected between 1 April to 8 May of 2020, before the emergence of omicron. Antibody reactivity in plasma to the isolated Wuhan-Hu-1 and Omicron NTD was measured by ELISA (FIG. 6). There was no association between IgM, IgG, or IgA anti-NTD Wuhan-Hu-1 or Omicron ELISA titers and age, sex, symptom severity, duration of symptoms, persistence of symptoms, or time between symptom onset and the first clinic visit (FIG. 7).

[0324] In convalescent individuals that had not been vaccinated, anti-Wuhan-Hu-1 NTD IgG reactivity was not significantly different between the 1.3- and 12-month time points (FIG. 6a). In contrast, IgG reactivity to the Omicron NTD dropped significantly between the two time points (FIG. 6b). Notably, there was no correlation between NTD and RBD IgG ELISA reactivity or NTD IgG ELISA reactivity and plasma geometric mean half-maximal neutralizing titers (NT50s, see below) in convalescent individuals that had not been vaccinated (FIG. 8). Vaccination of convalescent individuals resulted in significantly increased IgG ELISA reactivity to both Wuhan-Hu-1 and Omicron NTDs with a positive correlation between NTD and RBD ELISA, and NTD and plasma NT50 (FIGS. 8a-b). IgM and IgA anti-NTD reactivity in plasma was relatively low in all individuals tested, and only IgA was boosted with vaccination (FIG. 6c-d). It was concluded that anti-NTD ELISA reactivity to both Wuhan-Hu-1 and Omicron is enhanced by vaccination in convalescent individuals.

### Memory Anti-NTD Antibodies

[0325] Nearly all anti-NTD antibodies characterized to date were obtained using the intact S protein to capture specific memory B cells. Neutralizing anti-NTD antibodies obtained by this method represent a small subset of the total anti-S antibodies, and in most cases, they target a single carbohydrate flanked epitope that faces away from the cell membrane that is mutated in several variants of concern, including omicron. To focus on NTD, a combination of soluble Wuhan-Hu-1 and gamma NTD proteins was used to identify memory B cells producing antibodies specific for this domain.

[0326] Convalescent individuals that had not been vaccinated showed a small but significant increase in the number of anti-NTD memory B cells between the 1.3- and 12-months that was further boosted by vaccination (FIG. 1a and FIG. 9). 914 anti-NTD antibody sequences were obtained from 3 non-vaccinated and 3 vaccinated convalescent individuals assayed at the 2 time points (FIG. 1b and Table 2). Like the anti-RBD response, different individuals made closely related antibodies to NTD among which antibodies encoded by VH1-24, VH3-30, VH3-33, VH4-4, and VH4-39 were over-represented (FIG. 1c and FIG. 10).

[0327] Expanded clones of memory B cells were found at both time points. On average, expanded clones accounted for 22% and 27% of all antibodies at the 1.3- and 12-month time points, respectively, and 30 out of 90 such clones were conserved between time points (FIG. 1b and Table 2). Thus, most of the clones were unique to one of the two time points, indicating that the antibody response continued to evolve with persisting clonal expansion. B cell clonal evolution is associated with accumulation of somatic hypermutation. Consistent with the notion that the anti-NTD antibody response continues to evolve, there was a significant increase in Ig heavy and/or light chain somatic mutation between the two time points in all six individuals examined (FIG. 1d). CDR3 length was unchanged over time, and hydrophobicity was slightly lower for anti-NTD antibodies than control (FIG. 11).

[0328] 275 antibodies were expressed from the six individuals (124 and 151 from 1.3- and 12-month, respectively), including 1. 158 that were randomly selected from those that appeared only once evenly divided between 1.3- and 12-months; 2. 29 that appeared as expanded clones that were conserved at the two time points; 3. 16 and 43 newly arising expanded clones present at either the 1.3- or 12-month time points (Table 3). Each of the antibodies was tested for binding to Wuhan-Hu-1, delta, gamma, and omicron NTDs by ELISA (FIG. 2a). 97% of the antibodies cloned from the 1.3-month time point bound to the gamma NTD, and 82%, 69%, and 52% to Wuhan-Hu-1, delta, and omicron, respectively. The fraction of binding antibodies to Wuhan-Hu-1 and delta NTD improved significantly after 12 months (FIG. 2a and FIG. 12a). In addition, the geometric mean ELISA half-maximal concentration (EC50) increased significantly for all the variant NTDs after 12 months, indicating an increase in overall binding affinity over time (FIG. 2a and Table 3).

[0329] To determine whether antibody affinity increased between the two time points, biolayer interferometry experiments (FIG. 2b and FIG. 12b) were performed. Between 1.3- and 12-months affinity to the Wuhan-Hu-1 NTD increased among clonal pairs (28 nM to 5.6 nM) and unique antibodies (40 nM to 8.8 nM in unvaccinated or to 10 nM in vaccinated individuals) (FIG. 2b). It was concluded that anti-NTD antibodies evolve to higher affinity during the 12 months following infection irrespective of subsequent vaccination.

### Anti-NTD Antibody Neutralizing Activity

[0330] Antibodies that showed binding to NTD by ELISA were tested for neutralizing activity in a SARS-COV-2 neutralization assay using pseudotyped viruses encoding Wuhan-Hu-1, gamma, and PMS20 S proteins (Table 3). Among 275 NTD-binding antibodies, 103 neutralized at least one of the pseudoviruses with an IC₅₀ of less than 1000 ng/ml (Table 3). The fraction of Wuhan-Hu-1-neutralizers among the anti-NTD antibodies obtained from convalescent individuals was 22%, 28%, and 24% at 1.3-, 12-month, and 12-month vaccinated individuals, respectively. In contrast, the overall neutralizing activity among anti-RBD antibodies obtained from the same time points from this cohort was significantly higher in all cases (58%, 68%, 75%, respectively) (FIG. 2c). Anti-NTD neutralizing antibodies were significantly enriched in IGVH1-24, IGVH3-33, and IGVH3-30 all of which are enriched among neutralizing antibodies that target the NTD supersite (FIG. 2d and Table 4). IGVH1-24 was frequently associated with IGVL1-51, which is also over-represented among neutralizers compared to the database (Table 4). The neutralizers obtained by this method were also enriched in VH4-39, which has not been associated with NTD supersite neutralizing activity (FIG. 2d).

[0331] Among the antibodies tested, the geometric mean IC₅₀ against Wuhan-Hu-1, gamma, PMS20 was similar at 1.3- and 12-months (FIG. 3a, FIG. 13a, and Table 3). Vaccination was associated with increased neutralizing activity at 12 months against gamma but not the other two strains tested (FIG. 3a). There was also no change in geometric mean IC₅₀ when only the conserved clones were considered (FIG. 13b). Therefore, there is no general increase in anti-NTD antibody neutralizing activity over time despite the relative increase in affinity.

[0332] Although the neutralizing activity of the NTD antibodies was generally lower than RBD antibodies cloned from the same time points from this cohort (FIG. 3a and FIG. 13a), some anti-NTD antibodies were very potent with IC₅₀ values as low as 0.17 nanograms per milliliter (FIG. 3a). Of the 103 neutralizing anti-NTD antibodies with demonstrable neutralizing activity, 14 were specific for Wuhan-Hu-1, 20 were limited to gamma, and 13 were PMS20 specific (FIG. 3b). The remaining 56 antibodies neutralized two or more strains (FIG. 3b). Antibodies targeting the NTD supersite are enriched in VH1-24, VH3-30, and VH3-33, and these 3 VH genes account for 59 of the 103 antibodies tested (FIG. 3b, FIG. 13c, and Table 4). Notably, despite its mutations in the NTD supersite, 24 antibodies neutralized PMS20 and 6 neutralized all three strains, indicating that some of these antibodies might bind to epitopes outside of the supersite.

[0333] To document the neutralizing breadth of the 6 broadest antibodies, they were tested against viruses pseudotyped with SARS-COV-2 alpha, beta, delta, iota and omicron, and SARS-COV S proteins (FIG. 3c). Although none of the antibodies neutralized SARS-COV, 4 of the 6 antibodies neutralized all strains tested, albeit at relatively high neutralizing concentrations. However, pseudovirus neutralization was incomplete even at very high antibody concentrations for 2 of the more potent antibodies tested (FIG. 3d).

[0334] To determine whether intact virus neutralization resembles pseudovirus neutralization, microneutralization experiments were performed using authentic SARS-COV-2-WA1/2020 and -beta. In contrast to the pseudovirus, the two antibodies that showed the most incomplete neutralization profiles against pseudovirus, C1520 and C1565, reached complete neutralization and were exquisitely potent with IC₅₀ₛ in the low nanogram per milliliter range against both strains (FIG. 3c, e). It was concluded that some naturally arising memory anti-NTD antibodies produced in response to Wuhan-Hu-1 infection and immunization are insensitive to the mutations found in Omicron and other variants of concern.

[0335] To determine whether the collection of anti-NTD neutralizing antibodies target overlapping epitopes, biolayer interferometry competition experiments were performed (FIGS. 4a and b). Among the 43 antibodies with the highest neutralizing activity tested, there were 6 discernible complementation groups. Groups I and II were overlapping and highly enriched in VH3-30, VH3-33, and VH1-24, respectively, accounting for nearly 90% of the antibodies in these two groups (FIG. 4b). These antibodies neutralized either or both Wuhan-Hu-1 and gamma, but none neutralized PMS20 or omicron that are mutated in the NTD supersite. Thus, these two groups of antibodies appear to target the previously defined supersite on NTD. Group III and IV are also overlapping, but in contrast, in groups III and IV, only 3 of the 19 neutralize Wuhan-Hu-1 and those that do are broad. Notably, the remaining antibodies fail to measurably neutralize Wuhan-Hu-1 but neutralize PMS20 and/or omicron (FIG. 4b and Table 4). Group V contains 4 members, 3 of which are broad. The final group VI contains 2 members, C1621 only neutralizes Wuhan-Hu-1, and C1554 neutralizes broadly but not potently. The broadest neutralizing anti-NTD antibodies appear to recognize sites outside of the supersite and are not dominated by VH1-24 and VH3-30/3-33. Altogether 16 out of the 43 anti-NTD neutralizing antibodies tested neutralized PMS20 and/or omicron but not Wuhan-Hu-1. Thus, the B cell memory compartment produced in response to infection with Wuhan-Hu-1 contains antibodies that bind to this strain with high affinity, but do not neutralize it and instead neutralize PMS20 and/or omicron.

### Neutralizing Epitopes on NTD Outside the Supersite

[0336] To delineate the structural basis for broad-recognition of NTD-directed antibodies, structures of WT SARS-COV-2 S 6P bound to Fab fragments of C1717 (group III), C1520 (group IV), and C1791 (group V) were determined using single-particle cryo-electron microscopy (cryo-EM) (FIG. 14 and Table 5). Global refinements yielded maps at 2.8 Å (C1520-S), 3.5 Å (C1717-S), and 4.5 Å (C1791-S) resolutions, revealing Fab fragments bound to NTD epitopes on all three protomers within a trimer irrespective of ‘up’/′down′ RBD conformations for all three Fab-S complexes. C1520 and C1791 Fabs recognize epitopes on opposite faces of the NTD, with binding poses orthogonal to the site i antigenic supersite and distinct from C1717 pose, consistent with BLI mapping data (FIG. 4b and FIG. 14j). A 4.5 Å resolution structure of antibody C1791 (VH3-23*01/VK1-17*01) bound to a S trimer revealed a glycopeptidic NTD epitope wedged between the N61NTD- and N234NTD-glycans, engaging several N-terminal regions including the N1-, N2- and b8-b9 hairpin loops (FIG. 14k). The binding pose of C1791 is similar to the cross-reactive antibody S2L20, which was shown to maintain binding against single NTD mutations and several VOCs but was non-neutralizing.

[0337] Antibody C1520 (VH3-48*03/VL4-68*02) recognizes the NTD b-sandwich fold, with a distinct pose relative to similar cross-reactive NTD mAbs (FIGS. 5a-b and FIG. 15a). The C1520 epitope comprises residues along the supersite b-hairpin (residues 152-158), the b8-strand (residue 97-102), N4-loop (residues 178-188), and N-linked glycans at positions N122 and N149 (FIG. 5c). Targeting of the NTD epitope was driven primarily by heavy chain contacts (the buried surface area (BSA) of NTD epitope on the C1520 HC represented ˜915 Å2 of ˜1150 Å2 total BSA), mediated by the 20-residue long CDRH3 that contributed 55% of the antibody paratope (FIG. 5c, d). Previous studies have shown that CDRH3 loops of antibodies targeting this face of the NTD disrupt a conserved binding pocket that accommodates hydrophobic ligands, including polysorbate 80 and biliverdin, which have the potential to prevent binding of supersite antibodies. The 20-residue long CDRH3 of C1520 displaces the supersite b-hairpin and N4 loops, which acts as a gate for the hydrophobic pocket (FIG. 5e), in a manner similar to antibody P008-056 (FIG. 15b). This contrasts Ab5-7 that directly buries the tip of its CDRH3 into the hydrophobic pocket, and S2X303 that maintains a closed gate and partially overlaps with the supersite b-hairpin (FIG. 15b). Thus, C1520's increased cross-reactivity and neutralization breadth relative to Ab5-7 and S2X303 is likely mediated by displacement of the supersite b-hairpin and N4-loops, which harbor escape mutations found in several SARS-COV-2 VOCs and can undergo structural remodeling to escape antibody pressure (FIG. 5e).

[0338] The Group III antibody, C1717, that showed neutralization breadth against SARS-COV-2 VOCs and distinct binding properties from group IV and V antibodies (FIG. 3c, FIG. 4b, and FIG. 14j) was next investigated. Antibody C1717 (VH1-69*04/VL1-44*01) recognizes the viral membrane proximal side of the NTD (FIG. 5f), similar to S2M24, DH1052, and polyclonal Fabs from donor COV57. However, C1717's pose is unique and represents a new antigenic site that recognizes a glycopeptidic epitope flanked by the N282NTD- and N603SD2-glycans and is positioned in close proximity (<12 Å) to the S2-fusion peptide region (FIG. 5f, g). All six CDR loops contribute to an epitope that spans both the NTD and SD2 regions (residues 600-606) with a spike epitope BSA of ˜1325 Å2 (FIG. 5g). CDRH1 and CDRH3 loops mediate extensive hydrogen bond and van der Waals contacts with the C-terminus of the NTD (residues 286-303) and SD2 loop (residues 600-606), whereas CDRH2 engages N-terminal regions (residues 27-32, 57-60) and NTD loop residues 210-218 (FIG. 5h-k). C1717 light chain CDRL2 and CDRL3 loops contact the C-terminus of the NTD (residues 286-303) and the NTD loop 210-218, respectively (FIG. 5i, j). In addition, light chain FWR3 buries against the N282NTD-glycan, a complex-type N-glycan that wedges against the SD1 domain of the adjacent protomer (FIG. 5f-g, i). Modeling of Omicron mutations found in NTD loop 210-218 shows accommodation of the 214-insertion and potential establishment of backbone contacts with the NTD loop and R95Lc in CDRL3 (FIG. 5k). Moreover, stabilization of the N282NTD-glycan against the adjacent protomer and the proximity of the C1717 LC to the S2 fusion machinery potentially contributes to C1717's neutralization mechanism by preventing access to the S2′ cleavage site or destabilization of S1. Such a mechanism could explain the lack of Delta VOC neutralization, as this variant has been shown to have enhanced cell-cell fusion activity relative to all other VOCs.

### DISCUSSION

[0339] SARS-COV-2 infection or vaccination produces neutralizing antibody responses that contribute to better clinical outcomes. The RBD and NTD of the spike trimer(S) constitute the two major neutralizing targets for the antibody system. Neutralizing antibodies targeting the RBD bind to several different sites on this domain. In contrast, most neutralizing antibodies to NTD characterized to date bind to a single supersite, however, these antibodies were obtained by methods that were not NTD specific. Here, NTD specific probes were used to focus on anti-NTD memory B cells in a cohort of pre-omicron infected individuals, some of whom were also vaccinated. Of 275 NTD binding antibodies tested, 103 neutralized at least one of three tester strains, Wuhan-Hu-1, Gamma, or PMS20, a synthetic variant that is extensively mutated in the NTD supersite. Among the 43 neutralizing antibodies that were further characterized, 6 complementation groups were identified in competition binding experiments. 58% targeted epitopes outside the NTD supersite, and 58% neutralized either gamma or omicron, but only 14% were broad neutralizers. Three of the broad neutralizers were characterized structurally. C1520 and C1791 recognize epitopes on opposite faces of the NTD with a distinct binding pose relative to previously described antibodies allowing for greater potency and cross-reactivity with 7 different variants, including Beta, Delta, Gamma, and Omicron. Antibody C1717 represents a previously uncharacterized class of NTD-directed antibodies that recognizes the viral membrane proximal side of the NTD and SD2 domain, leading to cross-neutralization of Beta, Gamma, and Omicron. It was concluded SARS-COV-2 infection and/or Wuhan-Hu-1 mRNA vaccination produces a diverse collection of memory B cells that produce anti-NTD antibodies, some of which can neutralize variants of concern. Rapid recruitment of these cells into the antibody secreting plasma cell compartment upon re-infection likely contributes to the relatively benign course of subsequent infections with SARS-COV-2 variants, including omicron.

[0340] In animal models, passive antibody infusion early in the course of infection accelerates viral clearance and protects against disease. In humans, rapid development of neutralizing antibodies to SARS-COV-2 is associated with better clinical outcomes. Finally, early passive transfer of neutralizing antibodies to high-risk individuals alters the course of the infection and can prevent hospitalization and death. Thus, antibodies play an essential role in both protection against SARS-COV-2 infection and serious disease.

[0341] The RBD and the NTD are the two dominant targets of neutralizing antibodies on the SARS-COV-2 S protein. When the memory B cell compartment is probed using intact S the majority of the neutralizing antibodies obtained target the RBD, and only a small number that is usually less potent or broad target the NTD. Among the neutralizers that recognize the NTD, the majority target the site i supersite, and these antibodies are enriched in IGVH3-33 and IGVH1-24. The few existing exceptions target a region orthogonal to the supersite featuring a pocket that accommodates hydrophobic ligands, such as polysorbate 80 and biliverdin. Focusing on the NTD and using complementary probes revealed six partially overlapping complementary groups of NTD neutralizing antibodies.

[0342] Groups I and II are partially overlapping and appear to target the supersite on the target cell facing the surface of the NTD. Group I is enriched in IGVH3-33 and IGVH3-30, while group II is enriched in IGVH1-24. Together, these two groups make up 42% of all the neutralizers characterized, none of which are broad or able to neutralize Omicron or PMS20 that carry extensive site i supersite mutations. Groups I and II differ in their ability to inhibit each other's binding to NTD, likely because they assume different binding poses. Group III is enriched in IGVH4-39 and is unusual in that all the antibodies in this group neutralize the synthetic PMS20 variant, but only 24% neutralize gamma, and only 1 of 18 tested is broad. The antibodies in this group target a novel site of neutralization on the membrane proximal side of the NTD, bridging the SD2 domain on the same protomer, and potentially infringe on the S2 domain to impede spike function in viral-host membrane fusion. Groups IV, V, and VI comprise only 19% of all the NTD neutralizers tested but are highly enriched in the broad neutralizers, which have the potential to provide universal protection against SARS-COV-2 variants infection. Group IV and V antibodies target opposite sides of the NTD orthogonal to the site i supersite, recognizing epitopes that are non- or only partially overlapping with VOC mutations and are not significantly impacted by conformational changes in the supersite b-hairpin. While structurally unique in their binding pose, antibodies Group IV and V antibodies likely fail to inhibit ACE2 interactions, indicating a potent neutralization mechanism that stabilizes the prefusion spike glycoprotein.

[0343] Although a great number of SARS-COV-2 neutralizing antibodies have been identified, Omicron escapes the majority of them, including some antibodies in clinical use. Exploring new epitopes targeted by the broad neutralizers and conserved among SARS-COV-2 variants would be ideal targets for future development of broadly active sarbecovirus vaccines and antibody drugs to overcome antigenic shift.

[0344] Immune responses selectively expand two independent groups of B lymphocytes, plasma cells, and memory B cells. Plasma cells are end stage cells that are selected based on affinity. They are home to the bone marrow, where they reside for variable periods of time and secrete specific antibodies found in plasma. An initial contraction in the number of these cells in the first 6 months after SARS-COV-2 infection or vaccination likely accounts for the decrease in plasma neutralizing activity and subsequent loss of protection from infection.

[0345] Memory cells are found in circulation and in lymphoid organs, where they are relatively quiescent. B cells selected into this compartment are far more diverse than those that become plasma cells and include cells with somatically mutated receptors that have variable affinities for the immunogen. This includes cells producing antibodies with relatively high affinities that are highly specific for the antigen as well as cells producing antibodies with affinity for the initial immunogen and the ability to bind to closely related antigens. Production of a pool of long-lived but quiescent memory cells expressing a diverse collection of closely related antibodies, some of which can recognize pathogen variants, favors rapid secondary responses upon SARS-COV-2 variant exposure in pre-exposed and vaccinated individuals.

[0346] SARS-COV-2 infection or vaccination with Wuhan-Hu-1 produces plasma antibody responses that are relatively specific for Wuhan-Hu-1 and are sub-optimally protective against infection with variant strains such as Omicron. In contrast, memory B cell populations produced in response to infection or vaccination are sufficiently diversified to contain high affinity antibodies that can potently neutralize numerous different variants, including Omicron. This diverse collection of memory cells and their cognate memory T cells are likely to make a significant contribution to the generally milder course of infection in individuals that have been infected and/or vaccinated with SARS-COV-2.

Lengthy table referenced here
US20250333485A1-20251030-T00001
Please refer to the end of the specification for access instructions.

Lengthy table referenced here
US20250333485A1-20251030-T00002
Please refer to the end of the specification for access instructions.

Lengthy table referenced here
US20250333485A1-20251030-T00003
Please refer to the end of the specification for access instructions.

Lengthy table referenced here
US20250333485A1-20251030-T00004
Please refer to the end of the specification for access instructions.

Lengthy table referenced here
US20250333485A1-20251030-T00005
Please refer to the end of the specification for access instructions.

[0347] The foregoing examples and description of the preferred embodiments should be taken as illustrating, rather than as limiting the present invention as defined by the claims. As will be readily appreciated, numerous variations and combinations of the features set forth above can be utilized without departing from the present invention as set forth in the claims. Such variations are not regarded as a departure from the scope of the invention, and all such variations are intended to be included within the scope of the following claims. All references cited herein are incorporated by reference in their entireties.

LENGTHY TABLES
The patent application contains a lengthy table section. A copy of the table is available in electronic form from the USPTO web site (https://seqdata.uspto.gov/docdetail?docId=US20250333485A1). An electronic copy of the table will also be available from the USPTO upon request and payment of the fee set forth in 37 CFR 1.19(b)(3).

The application's sequence listing, which the Patent Office published only in electronic form, follows.

SEQUENCE LISTING (4713 sequences)

SEQ ID NO: 1 - protein, 122 aa, synthetic construct
  REGION 1..122: note = Synthetic
QVQLVQSGAEVKKPGASVKVSCKVSGYTLTELSMHWVRQAPGKGLEWMGGFDPEDGETIYAQKFQGRVTMTEDTSTDTAYMELSSLRSEDTAVYYCATGYAYCGGDCLIDYWGQGTLVTVSS

SEQ ID NO: 2 - protein, 108 aa, synthetic construct
  REGION 1..108: note = Synthetic
QSVLTQPPSASGTPGQRVTISCSGSSSNIGSNYVYWYQQLPGTAPKLLIYRNNQRPSGVPDRFSGSKSGTSASLAISGLRSEDEADYYCAAWDDSPVVFGGGTKLTVL

SEQ ID NO: 3 - protein, 121 aa, synthetic construct
  REGION 1..121: note = Synthetic
QVQLVQSGAEVKRPGASVKVSCKVSGYTLTELSIHWVRQAPGKGLEWMGGFDPEYGETIYAQKFQGRVTMTEDTSTDTAYMELSSLRSEDTAVYYCATAPAITISGWLDPWGQGTLVTVSS

SEQ ID NO: 4 - protein, 111 aa, synthetic construct
  REGION 1..111: note = Synthetic
QSALTQPPSASGSPGQSVTISCTGTSSDVGGYNYVSWYQQHPGKAPKLMIYEVSQRPSGVPDRFSGSKSGNTASLTVSGLQAEDEADYYCSSYAGSNNYVVFGGGTKLTVL

SEQ ID NO: 5 - protein, 122 aa, synthetic construct
  REGION 1..122: note = Synthetic
QVQLVQSGAEVKKPGASVKVSCKVSGYTLIELSIHWVRQAPGKGLEWMGGFDPEDAETIYAQKFQGRVTMAEDTSTDTAYMELSSLRSEDTAVYYCTAGPAYSSGWFPPWYWGQGTLVTVSS

SEQ ID NO: 6 - protein, 111 aa, synthetic construct
  REGION 1..111: note = Synthetic
QSVLTQPPSVSAAPGQKVTISCSGSSSNIGNNYVSWYQQLPGTAPKLLIYENNKRPSGIPDRFSGSKSGTSATLGITGLQTGDEADYYCGTWDSSLSAGGVFGGGTKLTVL

SEQ ID NO: 7 - protein, 127 aa, synthetic construct
  REGION 1..127: note = Synthetic
QVQLVESGGGVVQPGRSLRLSCAASGFTFSSYGMHWVRQAPGKGLEWVAVISFDGSNKYYADSVKGRFTISRDNSKNTLYLQMNSLRAEDTAMYYCAKVHGYNSSPGAFYYYGMDVWGQGTTVTVSS

SEQ ID NO: 8 - protein, 107 aa, synthetic construct
  REGION 1..107: note = Synthetic
SYELTQPLSVSVALGQTARITCGGNNIGSKNVHWYQQKPGQAPVLVIYRDYNRPSGIPERFSGSNSGNTATLTISRAQAGDEADYYCQVWDSSSSVVFGGGTKLTVL

SEQ ID NO: 9 - protein, 126 aa, synthetic construct
  REGION 1..126: note = Synthetic
EVQLLESGGGLVQPGGSLRLSCAVSGFTFSSYAMSWVRQAPGKGLEWVSSISGSGGSTYNADSVKGRFTISRDNSKNTLYLQMNSLRAEDTAVYYCAKCGFGTPPPTYYYYYGMDVWGQGTTVTVS

SEQ ID NO: 10 - protein, 108 aa, synthetic construct
  REGION 1..108: note = Synthetic
DIQLTQSPSFLSASVGDRVTITCRASQGISSYLAWYQQKPGKAPKLLIYAASTLQSGVPSRFSGSGSGTEFTLTISSLQPEDFATYYCQHLNSYPRLTFGGGTKVEIK

SEQ ID NO: 11 - protein, 127 aa, synthetic construct
  REGION 1..127: note = Synthetic
QVQLVESGGGLVKPGGSLRLSCAASGFTFSSNSMNWVRQAPGKGLEWVSSTSSSSSYIYYADSVKGRFTISRDNAKNSLYLQMNSLRAEDTAVYYCARAAPHYYDSSGYYPTPLDYWGQGTLVTVSS

SEQ ID NO: 12 - protein, 108 aa, synthetic construct
  REGION 1..108: note = Synthetic
EIVMTQSPATLSVSPGERATLSCRASQSVSSNLAWYQQKPGQAPRLLIYGASTRATGISARFSGSGSGTEFTLTISSLQSEDFAVYYCQQYYNWPPWTFGQGTKVEIK

SEQ ID NO: 13 - protein, 129 aa, synthetic construct
  REGION 1..129: note = Synthetic
QVQLVESGGGLVKPGGSLRLSCAASGFTFSTYGMNWVRQAPGKGLEWVSSISSSSSYIYYADSVKGRFTISRDNAKNSLSLQMNSLRAEDTAVYYCARDLELAARPSEWDYYYFGMDVWGQGTTVTVSS

SEQ ID NO: 14 - protein, 108 aa, synthetic construct
  REGION 1..108: note = Synthetic
EIVMTQSPATLSVSPGERATLSCRASQSVASNLAWYQQKPGQAPRLLIYGASTRATGIPARFSGSGSGTDFTLTISSLQSEDFAVYYCHQYYNWPPWTFGQGTKVEIK

SEQ ID NO: 15 - protein, 130 aa, synthetic construct
  REGION 1..130: note = Synthetic
QVQLVQSGAEVKKPGASVKVSCKASGYTFTSYGISWVRQAPGQGLEWMGWISAYNGNTNYAQKLQGRVTMTTDTSTSTAYMELRSLRSDDTAVYYCARALTRSYYYGSGSYYYNNWFDPWGQGTLVTVSS

SEQ ID NO: 16 - protein, 111 aa, synthetic construct
  REGION 1..111: note = Synthetic
QSALTQPASVSGSPGQSITISCTGTSSDVGGYNYVSWYQQHPGKAPKLMIYDVTNRPSGVSNRFSASKSGNTASLTISGLQAEDEADYYCSSYTSSSTLWVFGGGTKLTVL

SEQ ID NO: 17 - protein, 126 aa, synthetic construct
  REGION 1..126: note = Synthetic
QVQLVESGGGLVKPGGSLRLSCAASGFTFSSYSMNWVRQAPGKGLEWVSSISSSSSYIYYADSVKGRFTISRDHAKNSLYLQMNSLRAEDTAVYYCARAQNYYGTSGYYPEGLDYWGQGTLVTVSS

SEQ ID NO: 18 - protein, 108 aa, synthetic construct
  REGION 1..108: note = Synthetic
EIVMTQSPATLSVSPGERATLSCRASQSVSSNLAWYQQKPGQAPRLLIYGASTRATGIPARFSGSGSGTEFTLTISSLQSEDFAVYYCQQYNNWPPWTFGQGTKVEIK

SEQ ID NO: 19 - protein, 121 aa, synthetic construct
  REGION 1..121: note = Synthetic
QVQLVQSGAEVKKPGASVKVSCKVSGYTLPELSIHWVRQAPGKGLEWMGGFDPEDGETIYAQKFQGRVTMTEDTSTDTAYLELSSLRSEDTAVYYCAAGPAVIRGGWFDPWGQGTLVTVSS

SEQ ID NO: 20 - protein, 110 aa, synthetic construct
  REGION 1..110: note = Synthetic
QSALTQPASVSGSPGQSITISCTGTSSDVGSYNLASWYRQHPGKAPKLMIYEGSKRPSGVSNRFSGSKSGNTASLTISGLQAEDEADYFCCSYAGSGTWVFGGGTKLTVL

SEQ ID NO: 21 - protein, 132 aa, synthetic construct
  REGION 1..132: note = Synthetic
QVQLVQSGAEVKKPGASVKVSCKVSGYSLIEVSMHWVRQAPGKGLEWMGGFDPEDAETIYAQKFQGRVTMTEDTSTDTAYMELSSLRSEDTAVYYCATDLPYCSGDCYPTEVPKYSYGMDVWGQGTTVTVSS

SEQ ID NO: 22 - protein, 108 aa, synthetic construct
  REGION 1..108: note = Synthetic
QSALTQPASVSGSPGQSITISCTGTSSDVGSYNLVSWYQQHPGKAPKLMIYEGSKRPSGVSNRFSGSKSGNTASLTISGLQAEDEADYYCCSYAGNWVFGGGTKLTVL

SEQ ID NO: 23 - protein, 112 aa, synthetic construct
  REGION 1..112: note = Synthetic
QVQLVQSGAEVKKPGASVKVSCKVSGYTLTELSMYWVRQAPGKGLEWMGGFDPEDGETIYAQKFQGRVTMTEDTSTDTAYMELSSLRSEDTAVYYCATDGLWGQGTMVTVSS

SEQ ID NO: 24 - protein, 108 aa, synthetic construct
  REGION 1..108: note = Synthetic
SYELTQPPSVSVSPGQTARITCSGDALPKKYAYWYQQKSGQAPVLVIYEDSKRPSGIPERFSGSSSGTMATLTISGAQVEDEADYYCYSTDSSGNHWVFGGGTKLTVL

SEQ ID NO: 25 - protein, 122 aa, synthetic construct
  REGION 1..122: note = Synthetic
EVQLVESGGGLVQPGQSLRLSCTASGFTFGDYAMSWVRQAPGKGLEWVGFIRSKTYGGTTQYAASVKGRFTISRDDSKSIAYLQMNSLKTEDTAVYCCTRLDKWGLSYFDYWGQGTLVTVSS

SEQ ID NO: 26 - protein, 110 aa, synthetic construct
  REGION 1..110: note = Synthetic
QSALTQPRSVSGSPGQSVTISCTGTSSDVGGYNSVSWYQQHPGAAPKLMIYDVNKRPSGVPDRFSGSKSGNTASLTISGLQAEDEVDYYCCSYAGSYSYVFGTGTKVTVL

SEQ ID NO: 27 - protein, 127 aa, synthetic construct
  REGION 1..127: note = Synthetic
QVQLQESGPGLVKPSQTLSLTCTVSGGSISSGHDYWSWVRQPPGKGLEWIGYIYHSGSTYYNPSLKSRVTISLDTSKNQFSLRLSSVTVADTAVYYCAREGHEEGYGGPLNDVFDIWGQGTMVTVSS

SEQ ID NO: 28 - protein, 112 aa, synthetic construct
  REGION 1..112: note = Synthetic
DIVMTQSPDSLAVSLGERATINCKSSQSVLFSSNNKNYLAWYQQKPGQPPKLLIYWASTRESGVPDRFSGSGSGTDFTLTISSLRAEDVAVYYCQQYYSLRTFGQGTKVEIK

SEQ ID NO: 29 - protein, 126 aa, synthetic construct
  REGION 1..126: note = Synthetic
QVQLVQSGAEVKKPGASVKVSCKVSGYTLPELSMHWVRQTPGKGLEWMGGFHPEDAETIYAQKFQGRVTMTEDTSTDTAYMELSSLRAEDTAVYYCATSPPYCSNGVCYTHWFDPWGQGTLVTVSS

SEQ ID NO: 30 - protein, 109 aa, synthetic construct
  REGION 1..109: note = Synthetic
QSVLTQPPSVSAAPGQKVTISCSGSSSNIGNNYVSWYQQLPGTAPKLLIYENNKRPSGIPDRFSGSKSGTSATLGITGLQTGDEADYYCGTWDSSLSAVFGTGTKVTVL

SEQ ID NO: 31 - protein, 127 aa, synthetic construct
  REGION 1..127: note = Synthetic
EVQLVESGGGLVQPGGSLRLACVASGFTFSIYEMNWVRQAPGKGLEWVSYITTSGHARYNADSVKGRFTISRDNSKNSFYLQMNSLRAEDTAIYYCARPQYHYYDTSTYHSYGFDIWGQGTMVTVSS

SEQ ID NO: 32 - protein, 111 aa, synthetic construct
  REGION 1..111: note = Synthetic
QLVLTQSPSASASLGASVNLTCTLSSGHNSYAIAWHQQQPEKGPRYLMSLNSDGSHTKGDGIPDRFSGSSSGAERFLTISSLQSEDEADYYCQTWDTGIRVFGGGTRLTVL

SEQ ID NO: 33 - protein, 130 aa, synthetic construct
  REGION 1..130: note = Synthetic
QVQLVESGGGVVQPGRSLRLSCAASGFSFDKYALHWVRQAPGKGLEWVADISFDGSQKHHADSVKGRFTISRDNSKNTLYLQMNSLRAEDTAVYYCARDFVLCSSSTCRGGVFLGGMDLWGQGTTVTVSS

SEQ ID NO: 34 - protein, 107 aa, synthetic construct
  REGION 1..107: note = Synthetic
EIVLTQSPATLSLSPGERATLSCRASQSVGSYLAWYQQVPGQAPRLLIYDASNRATGIPPRFSGSGSGTDFTLTISSLEPADCAVYYCQQRSNWPFSFGGGTKVEIK

SEQ ID NO: 35 - protein, 121 aa, synthetic construct
  REGION 1..121: note = Synthetic
QVQLQESGPGLLKPSQTLSLTCTVSSGPMNTGNYYWSWIRQPPGKGLEWIGYIHYRGSTYYDPSLKSRATISVDTSEDQFSLILTSVTAADTAIYYCARVTMTWSWYFDLWGRGTLVTVSS

SEQ ID NO: 36 - protein, 108 aa, synthetic construct
  REGION 1..108: note = Synthetic
QSALTQPRSVSGSPGQSVTMSCTGAISDVANYNYFSWYQQHPGRAPKLILFDVNKRPSGVPDRFSGSRSGNTASLTISGLQAEDEAEYYCCSYTDTWVFGGGTKLAVL

SEQ ID NO: 37 - protein, 117 aa, synthetic construct
  REGION 1..117: note = Synthetic
QVQLQESGPGLVKPSGTLSLTCAVSGDSISSNTWWSWVRQPPGKGLEWIGEIFHSGNTNYNPSLKSRLTMSIDKSKNQITLNLTSVTAADTAVYYCARGWIVSAAHWGQGTLVTVSS

SEQ ID NO: 38 - protein, 110 aa, synthetic construct
  REGION 1..110: note = Synthetic
QSALTQPASVSGSPGQSITISCTGTNSDVGSYNLVSWFQQHPGKAPNLMIFEGTKRPSGVSNRFSGSKSGNTASLTISGLQAEDEADYFCCSYAGFSTWVFGGGTKLSVL

SEQ ID NO: 39 - protein, 124 aa, synthetic construct
  REGION 1..124: note = Synthetic
EVQLVESGGGLVQPGGSLRLSCAASGFTFSDYWMSWVRQAPGKGLEWVANINQDGSDHYSVDSVMGRFTISRDNAKRSLSLHMDSLRAEDTAVYYCARHNSTYPYYYFYGMDVWGRGTTVTVSS

SEQ ID NO: 40 - protein, 107 aa, synthetic construct
  REGION 1..107: note = Synthetic
DIQMTQSPSSLSAFVGDRVTITCRASQGIRNDLGWYQQKSGKAPKLLIYAASGLQSGVPSRFSGSGSGTDFTLTISSLQPEDFATYYCLQDHTYPLTFGGGTKVEIK

SEQ ID NO: 41 - protein, 122 aa, synthetic construct
  REGION 1..122: note = Synthetic
QVQLVQSGAEVKKPGASVKVSCKASGYSFTSYGISWVRQAPGQGLEWMGWISGYNGNTDYAQRFQGRVTLTTDTSTSTASMEVRSLTSDDTAVYFCARDGSWRLSDYAMDVWGQGTTVTVSS

SEQ ID NO: 42 - protein, 111 aa, synthetic construct
  REGION 1..111: note = Synthetic
QSVLTQPPSASGIPGQRVTIPCSGSSSNIGTNHVCWYQQYPGTAPKLLIYRNNQRPSGVPDRFSGSKSGTSASLAISGLRSEDEADYFCATWDGSLSNLWVSGGGTKLTVL

SEQ ID NO: 43 - protein, 126 aa, synthetic construct
  REGION 1..126: note = Synthetic
QVQLVQSGAEVKKPGASVRVSCRVSGFTLPELSIHWVRQPPGKGLEWMGGFDPQSGATIYAQNFQGRVTLTEDTSTDTAFMDLKSLRSEDTAVYYCAISTPHCSSPNCYVNWFDPWGQGTLVTVSS

SEQ ID NO: 44 - protein, 112 aa, synthetic construct
  REGION 1..112: note = Synthetic
QSVLTQPPSVSAAPGQKVTISCSGSSSNIANNFVSWYQQLPGTAPKLLIYETNKRPSGIPDRFSGSKSGTSATLGITGLQTGDEADYYCATWDSSLSAGRVVFGGGTKLTVL

SEQ ID NO: 45 - protein, 120 aa, synthetic construct
  REGION 1..120: note = Synthetic
QVQLVQSGAEVKSPGASVKVSCKVSGYTLVELGVHWVRQAPGKGLEWMGGFDPEDAEIVYAQKFQDRIIITEDTSTDMAYMELRSLRSEDTAIYYCAASSPLSGDWLDPWGQGTLVTVSS

SEQ ID NO: 46 - protein, 110 aa, synthetic construct
  REGION 1..110: note = Synthetic
QSVLTQPPSVSAAPGQKVTISCSGGSSNVGNNSVSWYQQLPGTTPKLLIYETDKRPSGIPDRFSGSKSGTSATLDITGLQTGDEADYYCGTWDSSLSAGVFGGGTKLTVL

SEQ ID NO: 47 - protein, 125 aa, synthetic construct
  REGION 1..125: note = Synthetic
QVQLQESGPRLVKPSGTLSLTCAVSGGSVSNSHWWSWVRQSPGKGLEWIGEVFHSGNNNCNPSLQSRVTLSVDKSKNQFSLRMSSVTAADTAVYYCARRRADGSLTLPHDALDIWGQGTMVTVSS

SEQ ID NO: 48 - protein, 110 aa, synthetic construct
  REGION 1..110: note = Synthetic
QSALTQPASVSGSPGQSITISCTGTSSDVGSYNLVSWYQQHPGKAPKVIIYEATKRPSGVSNRFSGSRSGNTASLTISGLQAEDEADYHCFSYAGFSSWVFGGGTTLTVL

SEQ ID NO: 49 - protein, 124 aa, synthetic construct
  REGION 1..124: note = Synthetic
QVQLVQSGAEVKKPGASVKVSCKVSGYTLVELSIHWLRQAPGKGLEWMGGFDPEDTKTIYAQKFQGRVTMTEDTSTDTAYMEVSSLRSEDTAVYFCAATSALRPLIETSWFDPWGQGTLVTVSS

SEQ ID NO: 50 - protein, 111 aa, synthetic construct
  REGION 1..111: note = Synthetic
QSVLTQPPSVSAAPGQKVTISCSGSTSNIGSNFVAWYQHLPGAAPKLLIYENNKRPSGIPDRFSGSKSGTSATLGITGLQTGDEGDYYCGTWDSGLSGGGVFGGGTKLTVL

SEQ ID NO: 51 - protein, 122 aa, synthetic construct
  REGION 1..122: note = Synthetic
QVQLVQSGAEVKKPGASVKVSCKVSGYTLIELAIHWVRQAPGKGLEWMGGFDAEDAETIYAQKFQGRVTMTEDTSKDTAYMELSSLRSEDTAVYYCTTGPAYGSGWFPPWYWGQGTLVTVSS

SEQ ID NO: 52 - protein, 111 aa, synthetic construct
  REGION 1..111: note = Synthetic
QSVLTQPPSVSAAPGQKVTISCSGTSSNIGNNYVSWYQQFPGTAPKLLIYENDKRPSGIPDRFSASKSGTSATLGISGLQSGDEADYYCGTWDRSLGAGGVFGGGTKLTVL

SEQ ID NO: 53 - protein, 118 aa, synthetic construct
  REGION 1..118: note = Synthetic
QVQLVQSGAEVKKPGASVKVSCKASGYTFTNFGICWVRQAPGQGLEWMGWINSNNGDTIYAQKFQGRVTMTADSSTNTAYMALTSLRSDDTAVYFCARVADYGELDSWGQGPLVTVSS

SEQ ID NO: 54 - protein, 108 aa, synthetic construct
  REGION 1..108: note = Synthetic
SYELTQPPSVSVSPGQTARITCSGDALPKQYAYWYQQKPGQAPVLLIYKDTERPSGIPERFSGSGSGTTVTLTISGVQAEDEADYYCQSADNSDSPNWVFGGGTKLTV

SEQ ID NO: 55 - protein, 130 aa, synthetic construct
  REGION 1..130: note = Synthetic
QVQLVQSGAEVKKPGSSVKVSCKTSGVIFSRNAFSWVRQAPGQGLEWMGRIIPFLDVTNSAQEFQGRVTLNADKSTSTVYMELSSLRSEDTAIYYCARHNGDPYDFWSGYNTWAGGLDVWGQGTTVTVSS

SEQ ID NO: 56 - protein, 110 aa, synthetic construct
  REGION 1..110: note = Synthetic
QSVLTQPPSASGTPGQRVTISCSGSGSNIGSNAVNWYQQLPGTAPKLLIYNQNQRPSGVPDRFSGSKSGTSASLAIGGLQSEDEADYYCATWDDNLSGLVFGGGTKLTVL

SEQ ID NO: 57 - protein, 128 aa, synthetic construct
  REGION 1..128: note = Synthetic
QVQLVQSGAEVKKPGASVKVSCKVSEYTLTELSVHWVRQAPGKGLEWMGGFDPEDAETIYAQKFQGRVTMTEDTSTDTAYMELSSLGSEDTAVYYCATATALQWLDGAYHYHYGMDVWGQGTTVTVSS

SEQ ID NO: 58 - protein, 112 aa, synthetic construct
  REGION 1..112: note = Synthetic
DIVMTQTPLSSPVTLGQPASISCRSSQSLVHSDGNTYLSWLQQRPGQPPRLLIYKISNRVSGVPDRFSGSGAGTDFTLKISRVEAEDVGVYYCMQATQFPCTFGQGTKLEIK

SEQ ID NO: 59 - protein, 128 aa, synthetic construct
  REGION 1..128: note = Synthetic
QVQLVQSGAEVKKPGASVKVSCKVSGYTLTELSMHWVRQAPGKGLEWMGGFDPEAAETVYAQKFQGRVTMTEDTLTDIAYMELSSLRSEDTAVYYCAAGPAITGTPTQYSYFYGLDVWGRGTTVTVSS

SEQ ID NO: 60 - protein, 109 aa, synthetic construct
  REGION 1..109: note = Synthetic
QAVVTQEPSFSVSPGGTVTLTCGLSSGSVSARNYPSWYQQTPGQAPRTLIYNTDTRSSGVPTRFSGSVLGNKAALTITGAQTDDESDYYCMLYMGSGLRVFGGGTKLTV

SEQ ID NO: 61 - protein, 128 aa, synthetic construct
  REGION 1..128: note = Synthetic
QVQLVQSGAEVKKPGASVKVSCKVSGYTLTELSIHWVRQAPGKGLEWMGGFDPEDAETIYAQKFQGRVTMTEDTSTDTAYMDLSSLRAEDTAVYYCSAGVAVTGTPENYSYYYGMDVWGQGTTVTVSS

SEQ ID NO: 62 - protein, 107 aa, synthetic construct
  REGION 1..107: note = Synthetic
EIVMTQSPATLSVSPGERATLSCRASQSVSSNLAWYQQKPGQAPRLLIYGASTRATGIPARFSGSGSGTEFTLTISSLQSEDFAVYYCQQYNDWPRGFGQGTKVEIK

SEQ ID NO: 63 - protein, 128 aa, synthetic construct
  REGION 1..128: note = Synthetic
QVQLVQSGAEVKKPGASVKVSCKVSGYTLTELSIHWVRQAPGKGLEWMGGFDPEHAETIYAQKFKGRVTMTEDTSSDTAYMDLSNLRSEDTALYYCATAFAIRGTSDSYHYYYGMDVWGQGTTVTVSS

SEQ ID NO: 64 - protein, 112 aa, synthetic construct
  REGION 1..112: note = Synthetic
DIVMTQTPLSSPVTLGQPASISCRSSQSLVHSDGNTYLSWLQQRPGQPPRLLIYMISNRFSGVPDRFSGSGAGTDFTLKISRVEAEDVGLYYCMQTTQFPYTFGQGTKLEIK

SEQ ID NO: 65 - protein, 124 aa, synthetic construct
  REGION 1..124: note = Synthetic
QVQLQESGPGLVKPSQTLSLTCTVSGGSIGSGGYWSWIRQHPGTGLEWIGYIYYTGSTYYNPSFKSRLSISVDTSNNQFSLKLSSVTAADTAVYYCARDRPFFGSESPHAFDIWGQGTMVTVSS

SEQ ID NO: 66 - protein, 106 aa, synthetic construct
  REGION 1..106: note = Synthetic
DIQMTQSPSTLSASVGDRVTITCRASQSISSWLAWYQQKPGKAPKLLIYKASTLEGGVPSRFSGSGSGTEFTLTISSLQSDDFATYYCQQYNSYRTFGQGTKVEIK

SEQ ID NO: 67 - protein, 129 aa, synthetic construct
  REGION 1..129: note = Synthetic
QVQLVESGGGVVQPGRSLRLSCAASGFSFRSYGMHWVRQAPGKGLEWVAVISYDGSEEYHADSVKGRFAISRDNSKNTLSLQMSSLRPEDTAVYYCAKDQGDEDSSGWLRPHITFAMDVWGQGTTVTVS

SEQ ID NO: 68 - protein, 107 aa, synthetic construct
  REGION 1..107: note = Synthetic
DIQMTQSPSSLSASVGDRVTITCRASQGIRNDLAWYQQKPGKAPKRLIYAASSLQSGVPSRFSGSGSGTEFTLTISSLQPEDFATYYCLQYNSYPPTFGPGTKVDIK

SEQ ID NO: 69 - protein, 130 aa, synthetic construct
  REGION 1..130: note = Synthetic
QVQLVESGGGVVQPGRSLRLSCAASGFTFSSSIIYWVRQAPGKGLEWVAVVSLDGSNEYYADSVKSRFTVSSDYSKNTLYLQMNGLRAEDTGVYYCARDRVDSSTWYTVGYYYYNGMDVWGQGTTVTVSS

SEQ ID NO: 70 - protein, 107 aa, synthetic construct
  REGION 1..107: note = Synthetic
DIQLTQSPSFLSSSVGDRVTITCRASQDISSHLAWYQQRPGKAPKLLIYAASTLQSGVPSRFSGSESGTEFTLTISSLQPEDFATYFCQQLNTYPLTFGGGTKVEIK

SEQ ID NO: 71 - protein, 127 aa, synthetic construct
  REGION 1..127: note = Synthetic
QVQLVESGGGLVKPGGSLRLSCAASGFTFSSYNMNWVRQAPGKGLEWVSLISSSGRFIYYADSVKGRFTISRDNAKNSLFLQMNSLRAEDTAVYYCARDLPAERFLEWLLSYGMDVWGQGTTVTVSS

SEQ ID NO: 72 - protein, 109 aa, synthetic construct
  REGION 1..109: note = Synthetic
QSALTQPPSASGSPGQSVTISCTGTSSDIGGYNYVSWYQQHPGKAPKLMIYEVTKRPSGVPDRFSGSKSGNTASLTVSGLQAEDEADYYCSSYAGNSKIFGGGTKLTVL

SEQ ID NO: 73 - protein, 125 aa, synthetic construct
  REGION 1..125: note = Synthetic
QVQLVESGGGLVKPGGSLRLSCAASGFTFSSYSMNWVRQAPGKGLEWVSSISSSSNFIYYADSVKGRFTISRDNAKNSVYLQMNSLRAEDTAVYYCAREWNYYDSRGYYYGEYDYWGQGTLVTVS

SEQ ID NO: 74 - protein, 108 aa, synthetic construct
  REGION 1..108: note = Synthetic
EIVLTQSPGTLSLSPGERATLSCRASQSVSSSNLAWYQLKPGQAPRLLISGASSRATGIPDRFSGSGSGTDFTLTISRLEPEDFAVYYCQQYGSSPRTFGQGTKVEIK

SEQ ID NO: 75 - protein, 126 aa, synthetic construct
  REGION 1..126: note = Synthetic
EVQLVESGGGLVQPGGSLRVSCVASGFSFRNYEMNWVRQAPGKGLEWISYISSSDNITYYADSVKGRFTISRDNAKNSLYLQMNSLRAEDTAVYYCAREPPITIFGVVFPCCMDVWGQGTTVTVSS

SEQ ID NO: 76 - protein, 114 aa, synthetic construct
  REGION 1..114: note = Synthetic
QPVLTQPSSLSASPGASASLTCTFRSGINVGTYRIYWYQQKPGSPPQFLLRYNSDSDYQRGSAVPSRFSGSKDASANAGILLISGLHSEDDADYYCMIWHGSAWVFGGGTKLTV

SEQ ID NO: 77 - protein, 121 aa, synthetic construct
  REGION 1..121: note = Synthetic
QVQLVQSGAEVKRPGASVKVSCKVSGYTLVELSIHWVRQAPGKGLEWMGGFDPEDGETIYAQKFQGRVTMTEDTSTDTAYMQLSSLRSEDTAIYYCTTTTPKGHPGWLDPWGQGTLVTVSS

SEQ ID NO: 78 - protein, 110 aa, synthetic construct
  REGION 1..110: note = Synthetic
QSALTQPASVSGSPGQSITISCTGTSSDVGSYNLVSWYQQHPGKAPKLMIYEDNKRPSGVSSRFSGSKSGYTASLTISGLQAEDEADYYCCSYAGSGTSVFGTGTEVTVL

SEQ ID NO: 79 - protein, 121 aa, synthetic construct
  REGION 1..121: note = Synthetic
QVQLVQSGAEVKKPGASVKVSCKVSGYTLPEVSIHWVRQAPGKGLEWMGGFHPENVETIYSQKFQGRVTMTEDTSTDTAYMELSSLICDDTGVYYCALAPVLRLGGWFDPWGQGTLVTVSS

SEQ ID NO: 80 - protein, 110 aa, synthetic construct
  REGION 1..110: note = Synthetic
QSALTQPASVSGSPGQSITISCTGTDSDVGRYNYVSWYQQHPGKAPKLMIYEVTNRPSGVSNRFSASKSGNTASLSISGLQAEDEGDYYCSSYTGSTSWVFGGGTRLTVL

SEQ ID NO: 81 - protein, 128 aa, synthetic construct
  REGION 1..128: note = Synthetic
EVQLVESGGGLVQPGRSLRLSCAASGFTFDDYAMHWVRQVPGKGLEWVSGISWNSDNIGYADSVKGRFTISRDNAKKSLYLQMNSLRAEDTALYYCAKDWAPRYYYDISGYQNTMDVWGQGTTVTVSS

SEQ ID NO: 82 - protein, 108 aa, synthetic construct
  REGION 1..108: note = Synthetic
SYELTQPPSVSVAPGKTARITCGGNNIGSKSVHWYQQKPGQAPVLVVNDDSDRPSGIPERVSGSNSGNTATLTISRVEAGDEADYYCQVWDSSSDHVVFGGGTKLTVL

SEQ ID NO: 83 - protein, 115 aa, synthetic construct
  REGION 1..115: note = Synthetic
QVQLQESGPGLVKPSGTLSLTCAVSGGSISSSNWWSWVRQPPGKGLEWIGEIYHSGSTNYNPSLKSRVTMSLDKSKNQFSLKLNSVTAADTAVYYCARGWYFDYWGQGTLVTVSS

SEQ ID NO: 84 - protein, 110 aa, synthetic construct
  REGION 1..110: note = Synthetic
QSALTQPASVSASPGQSITISCTGTSSDVGSYNLVSWYQQHPGKAPKLMIYEGSKRPSGVSNRFSGSKSGNTASLTISGLQAEDEADYYCFSYAGSSTWVFGGGTKLTVL

SEQ ID NO: 85 - protein, 124 aa, synthetic construct
  REGION 1..124: note = Synthetic
QVQLQQWGAGLLKPSETLSLSCAVSGGSFSGYYWSWIRQPPGKGLEWIGEISHSGNFNYNPSFKSRVTLSVDTSKNQFSLNLRSVTAADTAMYYCARGFQPLDKLPTWDYFDYWGQGTLVTVSS

SEQ ID NO: 86 - protein, 107 aa, synthetic construct
  REGION 1..107: note = Synthetic
EIVMTQSPATLSVSLGERATLSCRASQSVSSNLAWYQQKPGQAPRLLIFGASTRATGIPARFSGSGSGTEFTLTISSLQSEDLAVFYCQQYNNWPRTFGQGTKVEIK

SEQ ID NO: 87 - protein, 125 aa, synthetic construct
  REGION 1..125: note = Synthetic
QVQLVESGGGLVKPGGSLRLSCAASGFTFSHSIMNWVRQAPGKGLEWVSSISSTSSFIYYVDSVKGRFTISRDNAKNSLYLQMNSLRPEDTAVYYCARTPNLRSDYWNEHYLDHWGQGTLVTVSS

SEQ ID NO: 88 - protein, 108 aa, synthetic construct
  REGION 1..108: note = Synthetic
EIVMTQSPATLSVSPGERATLSCRASQSVSSNLAWYQQKPGQAPRLLIYGASTRATGIPDRFSGSGSGTEFTLTISSLQSEDVAVYYCQQCYNWPPWTFGQGTKVEIK

SEQ ID NO: 89 - protein, 125 aa, synthetic construct
  REGION 1..125: note = Synthetic
QVQLVESGGGVVQPGRSLRLSCAASGFTFSSYGMHWVRQAPGKGLEWVAVVPFHGSDQHYADSVKGRFTVSRDNSKNIFYLQMNSLRTEDTAVYYCAKDRESTMTNFKVGGLDVWGQGTTVTVSS

SEQ ID NO: 90 - protein, 106 aa, synthetic construct
  REGION 1..106: note = Synthetic
SYELTQPPSVSVSPGQTANITCSGDELGDKYVCWYQQKPGQSPVMVIFLDDKRPSGIPERFSGSNSGNTATLTISGTQAMDEADYYCQAWDSSTLVFGGGTKLTVL

SEQ ID NO: 91 - protein, 120 aa, synthetic construct
  REGION 1..120: note = Synthetic
QVQLVQSGAEVKKPGASVKVSCKVSGYTLPEISIHWVREAPGKGLEWMGGFDPEDGETIYSQRFQGRVTMTEDTSTDTAYMELSSLRSEDTAVYYCAASSPFSGGWFHPWGQGTLVTVSS

SEQ ID NO: 92 - protein, 108 aa, synthetic construct
  REGION 1..108: note = Synthetic
QSALTQPASVSGSPGQSITISCTETSSDVGNYNLVSWYQQHPGKAPKLVIYEGTKRPSGVSNRFSASKSGNTASLTISELQAEDEANYYCCSYARSGVFGGGTKLTVL

SEQ ID NO: 93 - protein, 128 aa, synthetic construct
  REGION 1..128: note = Synthetic
QVQLVQSGAEVKKPGASVKVSCKASGYTFTGYSMHWVRQAPGQGLEWMGWINPNNGDTTYAQKFQGRVTMTRDTSVSTAYMELNRLRSDDTAVYYCAGLNSGDYYDDPGYSKGGMDVWGQGTTVTVSS

SEQ ID NO: 94 - protein, 109 aa, synthetic construct
  REGION 1..109: note = Synthetic
SYELTQPPSVSVSPGQTARITCSGDALPKRYAYWYQQKSGQAPVLVIYEDSKRPSGIPERFSGSSSGTMATLTISGAQVEDEADYHCYSTDTSDNHRGVFGGGTKLTVL

SEQ ID NO: 95 - protein, 127 aa, synthetic construct
  REGION 1..127: note = Synthetic
QVQLVQSGAEVKKPGPSVKVSCKASGGTFSSSAISWIRQAPGQGLEWMGRIIPMLNKANYAQKFQGRVTISADESTGTAYMELRSLRSEDTAVYYCARDRGVYDRGNYFYYYGMDVWGQGTTVTVSS

SEQ ID NO: 96 - protein, 112 aa, synthetic construct
  REGION 1..112: note = Synthetic
DIVMTQSPLSLPVTPGEPASISCRSSQSLLHNNGYKYLDWYLQKPGQSPQLLIYLGSNRASGVPDRFSGSGSGTDFTLKISRVEAEDVGVYYCMQALQSPHTFGQGTKLEIK

SEQ ID NO: 97 - protein, 127 aa, synthetic construct
  REGION 1..127: note = Synthetic
QVQLVQSGAEVRKPGASVKVSCKVSGYTLTELSMHWVRQSPGKGLEWMGSFDPDDGETFYAQKFQGRITMSEDTSTDTAYMELSSLRSEDTAVYFCATDSNMIVVRGNYYYSGLDVWGQGTTVTVSS

SEQ ID NO: 98 - protein, 107 aa, synthetic construct
  REGION 1..107: note = Synthetic
EIVMTQSPATLSVSPGERATLSCRASQSVAGNLAWYQQKPGLAPRLLIQGPSTRATGIPARFSGSGSGTEFTLTISSLQSEDFAVYYCHQYNNWPWTFGQGTKVEIK

SEQ ID NO: 99 - protein, 128 aa, synthetic construct
  REGION 1..128: note = Synthetic
QVQLVQSGAEVKKPGASVKVSCKVSGYTLTELSIHWVRQAPGKGLEWMGGFDPEGPETIYAQKFQGRVTMTEDTSTDTAYMEVSSLTSEDTAVYYCATAFAILGTNEKSHYYYGVDVWGQGTTVTVSS

SEQ ID NO: 100 - protein, 112 aa, synthetic construct
  REGION 1..112: note = Synthetic
DIVMTQTPLSSPVTLGQPASISCRSSQSLVHSDGNTYLSWLQQRPGQPPRLLIYKISNRVSGVPDRFSGSGAGTDFTLKISRVEAEDVGVYYCMQVTQFPYTFGQGTKLEIK

SEQ ID NO: 101 - protein, 123 aa, synthetic construct
  REGION 1..123: note = Synthetic
QVQLVQSGAEVKKPGASVKVSCKVSEYTLIELSMHWVRQAPGKRLEWMGGFDPEDVKTVYAQKFQGRVTMTEDTSTDTAYMELSSLRSEDTAVYYCAAVPALWRGHYSLPTHWGQGTLVTVSS

SEQ ID NO: 102 - protein, 108 aa, synthetic construct
  REGION 1..108: note = Synthetic
EIVLTQSPGTLSLSPGERATLSCRTSQSVSSSYLAWYQQKPGQAPRLLIYGASSRATGIPDRFSGSGSGTDFTLTISRLEPEDFAMYYCLQYGRSLYTFGQGTKLEIK

SEQ ID NO: 103 - protein, 127 aa, synthetic construct
  REGION 1..127: note = Synthetic
QVQLVESGGGVVQPGKSLRLSCAASGFTFSGSDMHWVRQAPGKGLEWVAVISSDGSNTYYRDSVKGRFTISRDNSKNTLYLQMISLRTEDTAVYYCAKDGASYDNTGHYSAEYFQHWGQGALVTVSS

SEQ ID NO: 104 - protein, 108 aa, synthetic construct
  REGION 1..108: note = Synthetic
SYELTQPPSVSVSPGQTARITCSGDALPKQYACWYQQKPGQAPVVVIYKDTERPSGIPARFSGSSSGTTVTLTISGVQAEDEADYYCQSADSSGPYVIFGGGTKLTVL

SEQ ID NO: 105 - protein, 121 aa, synthetic construct
  REGION 1..121: note = Synthetic
EVQLVESGGDLVQPGGSLRLSCAASGFTFSLYSMNWVRQAPGKGLEWISSITSGSTGIYYADSVRGRFTISRDNAKNSLYLQMSSLRDEDTAVYYCARDEGGYNYGISDYWGQGTLVTVSS

SEQ ID NO: 106 - protein, 108 aa, synthetic construct
  REGION 1..108: note = Synthetic
DIQMTQSPSSLSASVGDRVTITCRASQGIRNDLGWYQQKPGKAPKRLIYAASSLQSGVPSRFSGSGSGTEFTLTISSLQPEDFATYYCLQYNSYPRSTFGPGTKVDIK

SEQ ID NO: 107 - protein, 123 aa, synthetic construct
  REGION 1..123: note = Synthetic
EVQLVESGGGLVQPGGSLRLSCAASGFTFSSYWMSWVRQAPGKGLEWVANIKQDGSEKYYVDSVKGRFTISRDNAKNSLYLQMNSLRAEDTAVYYCARDSQMASRWPYGFDIWGQGTMVTVSS

SEQ ID NO: 108 - protein, 105 aa, synthetic construct
  REGION 1..105: note = Synthetic
EIVLTQSPGTLSLSPGERATLSCRASQSVSSSYLAWYQLKPGQAPRLLIYGASSRATGIPDRFSGSGSGTDFTLTISRLEPEDFAVYYCQQYGSSLGGGTKVEIK

SEQ ID NO: 109 - protein, 123 aa, synthetic construct
  REGION 1..123: note = Synthetic
QVQLVESGGGVVQPGGSLRLSCAASGFTFSLYGMHWVRQAPGKGLEWVAFINYDGTNKYYADSVKGRFTISRDNSKNTLYLVMDSLRAEDTAVYYCATSLRGSCINGVCWAYWGQRTLVTVSS

SEQ ID NO: 110 - protein, 110 aa, synthetic construct
  REGION 1..110: note = Synthetic
QTVVTQEPSLTVSPGGTVTLTCASSTGAVTSGYYPNWFQQKPGQAPRALIYSTNNKHSWTPARFSGSLLGGKAALTLSRVQPEDEAEYYCLLYYGGAHWVFGGGTKLTVL

SEQ ID NO: 111 - protein, 127 aa, synthetic construct
  REGION 1..127: note = Synthetic
EVQLVESGGGLVQPGGSLRLSCAASGFTFSIYEMNWVRQAPGKGLEWVSYITTSGSTRYNADSVKGRFTISRDNAKNSLYLHMNSLRAGDTAVYYCARPQYHYYDTSAYHSYGFDIWGQGTMVTVSS

SEQ ID NO: 112 - protein, 111 aa, synthetic construct
  REGION 1..111: note = Synthetic
QLVLTQSPSASASLGASVKLTCTLSSGHSSYAIAWHQQQPEKGPRYLMTLNSDGSHSKGDGIPDRFSGSSSGAERYLTISSLQSDDEADYYCQTWDTGIRVFGGGTKLTVL

SEQ ID NO: 113 - protein, 124 aa, synthetic construct
  REGION 1..124: note = Synthetic
QVQLVQSGAEVQKPGSSVKISCKTSGGTFSNSAINWVRQAPGQGLEWMARIIPILATSTSAQKFQGRVSITADRSTSTVYMEVSSLTSDDTAVYYCAIDRAGRQLERFAWFDPWGQGSLVTVSS

SEQ ID NO: 114 - protein, 110 aa, synthetic construct
  REGION 1..110: note = Synthetic
QSALTQPASVSGSPGQSITISCSGTSSDIGSYNVVSWYQQHPDKAPKVVIYEGIKRPSGISSRFSASRSGSTASLTISGLQAEDEADYYCCSYVGSSTWVFGGGTKVTVL

SEQ ID NO: 115 - protein, 124 aa, synthetic construct
  REGION 1..124: note = Synthetic
QVQLVESGGGVVQPGRSLRISCAASGFTFSNYGMHWVRQAPGKGLEWVTFIWYDGSNKYYADSVKGRFTISRDNFKNTLYLQMNSLRAEDTAVYYCARDRTDSSSFLAGYFDYWGQGTLVTVSS

SEQ ID NO: 116 - protein, 108 aa, synthetic construct
  REGION 1..108: note = Synthetic
SYELTQPPSVSVSPGQTARITCSGDALPKKYAYWYQQKSGQAPVLVIYEDSKRPSGIPETFSGSSSGTMATLTISGAQVEDEADYYCYSTHSSDDLWVFGGGTKLTVL

SEQ ID NO: 117 - protein, 119 aa, synthetic construct
  REGION 1..119: note = Synthetic
QVQLQQWGAGLLKPSETLSLTCDVYGGSPSGYYWSWIRQPPGKGLEWIGEITHTGNTNYNPSLKSRVAISIDTSKNQFSLKLNSVTAADTAVYYCARGLWILGCRFDPWGQGTLVTVSS

SEQ ID NO: 118 - protein, 107 aa, synthetic construct
  REGION 1..107: note = Synthetic
DIQMTQSPSSLSASVGDRVTITCRASQGFSNYLNWYQQNPGKAPKLLIYGASRLESGVPSRFSGSGSGTDFTLTISSLQPEDFATYYCQQSYSTPYTFGQGTKLEIK

SEQ ID NO: 119 - protein, 125 aa, synthetic construct
  REGION 1..125: note = Synthetic
QVQLVESGGGVVQPGKSLRLSCEASGFTFRNYGMHWVRQAPGKGLEWVAFIWYDGTDKYYADSVKGRSTISRDNSKNTLYLEMNSLRAEDTAVYYCARDFGFVVVVPDYDGLDVWGQGTTVTVSS

SEQ ID NO: 120 - protein, 110 aa, synthetic construct
  REGION 1..110: note = Synthetic
QSVLTQPPSASATPGQRVPISCSGGTSNIGSHSVYWYQHLPGTAPKLLIYRNDQRPSGVPDRFSGSKSGTSASLAISGLRSEDEADYYCAAWDDSLSGWVFGGGTRLTVL

SEQ ID NO: 121 - protein, 128 aa, synthetic construct
  REGION 1..128: note = Synthetic
QVQLVQSGAEVKKPGASVKVSCKVSDYTLTELSMHWVRQAPGKGLEWMGGFDPEEAETIYAQKFQGRVTMTEDTSTDTAYMELSSLRSEDTAVYFCAAAPAVFGVITSYYFYYGLDVWGQGTTVTVSS

SEQ ID NO: 122 - protein, 113 aa, synthetic construct
  REGION 1..113: note = Synthetic
QSVLTQPPSVSASPGQKVTISCSGSSSNFANNNVSWYQQLPGTAPKLLIYENNKRPSGILDRFSGSKSATSATLGITGLQTGDEADYYCGTWDTSLSARGNWVFGGGTKLTVL

SEQ ID NO: 123 - protein, 115 aa, synthetic construct
  REGION 1..115: note = Synthetic
QVQLQESGPGLVKPSGTLSLTCAVSGGSISSNNWWSWIRQPPGKGLEWIGEIYHSGNTNYNPSLKSRVTMSVDKSENQFSLRLNSVTAADTAVYYCARGWYYDYWGQGTLVTVSS

SEQ ID NO: 124 - protein, 110 aa, synthetic construct
  REGION 1..110: note = Synthetic
QSALTQPASVSGSPGQSITISCTGTSSDVGSYNLVSWYQQHPGKAPKLMIYEGNKRPSGVSNRFSGSKSGNTASLTISGLQAEDEAEYFCYSYAGSSTWVFGGGTKLTVL

SEQ ID NO: 125 - protein, 131 aa, synthetic construct
  REGION 1..131: note = Synthetic
EVQLLESGGGLVQPGGSLRLSCTASGFIFSRYAMTWVRQAPGKGLEWVSGISASGGGTYHADSVKGRFSISRDNSKNTLYLQMNSLRAEDTAVYYCAKVQDYDFWSGYPDRGHYYYGMDVWGQGTTVTVSS

SEQ ID NO: 126 - protein, 112 aa, synthetic construct
  REGION 1..112: note = Synthetic
DIVMTQTPLSLSVTPGQPASISCKSSQSLLYSDGKTYLYWYLQKPGQSPQLLISEVSSRFSGVPDRFSGSGSGTDFTLKISRVEAEDVGVYYCMQPIHLPWTFGQGTKVEIK

SEQ ID NO: 127 - protein, 122 aa, synthetic construct
  REGION 1..122: note = Synthetic
EVQLVESGGGLVQPGGSLRLSCSASGFTFSSYPMHWVRQAPGKGLEFVSAISSNGDRKHYADSVEGRFTISRDNSKNTLYLQMSSLRAEDTAIYYCVKVQYGQFWFSDFDYWGQGSLVTVSS

SEQ ID NO: 128 - protein, 109 aa, synthetic construct
  REGION 1..109: note = Synthetic
EIVLTQSPAALSLSPGERATLSCRASQSVSIYLAWYQQKPGQAPRLLIYDAANRATGIPARFSGSGSGTDFTLTISSLEPEDFAVYYCQQRGSWPPLYTFGQGTKLEIK

SEQ ID NO: 129 - protein, 123 aa, synthetic construct
  REGION 1..123: note = Synthetic
QVQLQESGSGLVKPSQTLSLTCAVSGGSISSGGLSWSWIRQPPGKDLEWIGFIYHSGSTYYNPSLKSRVTMSVDRSKNQFSLRLNSVTAADTAVYYCAREAGSTGWSVWFDPWGQGTLVTVSS

SEQ ID NO: 130 - protein, 113 aa, synthetic construct
  REGION 1..113: note = Synthetic
QSVLTQPPSVSAAPGQRVTISCTGSSSNIGAGNDVHWYQQFPGTAPKLLIYANTNRPSGVPDRFSGSKSGTSASLAITGLQSEDEADYYCQSYDSSLTGPSHVFGTGTKVTVL

SEQ ID NO: 131 - protein, 121 aa, synthetic construct
  REGION 1..121: note = Synthetic
QVQLVQSGAEVKKPGASVKVSCKVSGYTLIELSMHWVRQAPGIGLEWMGGFDAEDAKTIYAQKFQGRVTMTEDTSTDTAYMEVSSLRSEDTAVYYCATLYAITGTGPLWFWGQGTLVTVSS

SEQ ID NO: 132 - protein, 107 aa, synthetic construct
  REGION 1..107: note = Synthetic
DIQLTQSPSFLSASVGDRVSVTCRASQGISSYLAWYQQKPGKAPKFLIYAASTLQSGVPSRFSGSGSGTEFTLTISSLQPEDFATYYCQQLNSYPLTFGGGTKVEIK

SEQ ID NO: 133 - protein, 121 aa, synthetic construct
  REGION 1..121: note = Synthetic
QVQLQESGPGLVKPSETLSLTCTVSGGSISTSYWSWIRQPPGKGLEWIGYISYSGTTNYNPSLKSRVTIDTSKNQFSLNLSSVTAADTAVYYCARSDGEGPYPYYYGFDVWGQGTTVTVSS

SEQ ID NO: 134 - protein, 108 aa, synthetic construct
  REGION 1..108: note = Synthetic
SYELTQPPSVSVSPGQTARITCSGDALPKEYAYWYQQKPGQAPVLVIYKDSERPVGIPERFSGSSSGTTVTLTISGVQAEDESDYYCQSADTSGTSVVFGGGTKLTVL

SEQ ID NO: 135 - protein, 119 aa, synthetic construct
  REGION 1..119: note = Synthetic
EVQLVESGGGLVQPGGSLRLSCAASGFTFSTYDMHWVRQPTGKGLEWVSTIDTVGDTYYSGSVKGRFTISRENAKNSLYLQMNSLRPGDTAVYYCARVYGDYDLYFDLWGRGTLVTVSS

SEQ ID NO: 136 - protein, 107 aa, synthetic construct
  REGION 1..107: note = Synthetic
DIQMTQSPSSVSASVGDRVTITCRASQGISSWLGWYQQKPGKAPKLLIYAASSLQSGVPSRFSGSGSGTEFTLTISSLQPEDFATYYCQQGHTFPPDFGGGTKVEIK

SEQ ID NO: 137 - protein, 121 aa, synthetic construct
  REGION 1..121: note = Synthetic
QVQLQESGPGLVKPSQTLSLTCTVSGGSVTSGDYYWTWIRQHPGKGLEWIGYIFHSGSTYYNPSLESRVTLFVDASKNQFSLKLNSVTAADTAVYYCARTTTRVVWYFDLWGRGTLVTVSS

SEQ ID NO: 138 - protein, 109 aa, synthetic construct
  REGION 1..109: note = Synthetic
QSALTQPRSVSESPGQSVTISCTGTNSAVGGYNYVSWYQQHPGKAPKLMIYDVNKRPSGVPARFSGSKSGNTASLTISGLQTEDEADYYCSSYAGSSWVFGGGTKLTVL

SEQ ID NO: 139 - protein, 121 aa, synthetic construct
  REGION 1..121: note = Synthetic
QVQLQESGPGLVKPSQTLSLTCTVSGGSISSGGNYWSWIRQHPGKGLEWIGYIYHTGSTYHNPSLETRVTISVDTSKNQFSLKVNSVTAADTALYYCARAVIRGTWYFDLWGRGTLVTVSS

SEQ ID NO: 140 - protein, 108 aa, synthetic construct
  REGION 1..108: note = Synthetic
QSALTQPASVSGSPGQSITISCTRTNSDVGGFNYVSWYQHHPGKAPKLMIFDVNNRPSGISNRFSGSKSGNTASLTISGLQAEDEADYYCSSYTTTWVFGGGTKLTVL

SEQ ID NO: 141 - protein, 125 aa, synthetic construct
  REGION 1..125: note = Synthetic
QVQLVESGGGLVKPGGSLRLSCAASRFNFSSYSMNWVRQAPGKGLEWVSSISSSSNFIYYANSVKGRFTISRDNAKNSLYLQMNSLRAEDTAVYYCARDPVYSNSWFYYYYIDVWGKGTTVTVSS

SEQ ID NO: 142 - protein, 111 aa, synthetic construct
  REGION 1..111: note = Synthetic
QSALTQPASVSGSPGQSITISCTGTSSDVGTYNLVSWYQQHPGKAPKLMIYEVSKRPSGVSNRFSGSKSGNTASLTISGLQAEDEADYYCCSYAGSSTPYVFGSGTKVTVL

SEQ ID NO: 143 - protein, 126 aa, synthetic construct
  REGION 1..126: note = Synthetic
QVQLQESGPGLVKPSQTLSLTCTVSGTSINSGDYYWSWIRQPPGKGLEWIGYIYYTGSTYYNPSLKSRPTISLDTSKNQFSLKLNSVTAADTAVYFCARETRSPLYRELNGWFDPWGQGNLVTVSS

SEQ ID NO: 144 - protein, 111 aa, synthetic construct
  REGION 1..111: note = Synthetic
DIVMTQSPDSLAVSLGERATISCKSSQSILYSSNNKNYLAWYQHKLGQPPKLLIYWASTRESGVPDRFSGSGSGTDFTLTIANLQPEDVAVYYCQQYYSIRTFGQGTKVEI

SEQ ID NO: 145 - protein, 125 aa, synthetic construct
  REGION 1..125: note = Synthetic
QVQLVQSGAEVKKPGASVKVSCKVSGYTLPELSMHWVRQAPGKGLEWMGGFDPEHGETVYAQKFQGRVSMTEDTSTDTAYMELSSLRSEDTAVYYCVTSSPHLLQGVPRNWFDPWGQGTLVTVSS

SEQ ID NO: 146 - protein, 110 aa, synthetic construct
  REGION 1..110: note = Synthetic
QSVLTQPPSVSAAPGQKVTIPCSGSSSNIGNNYVSWYQQLPGTAPKLLIYENNKRPSGIPDRFSGSKSGTSATLGITGLQTGDEADYYCGTWDSSLSAVVFGGGTKLTVL

SEQ ID NO: 147 - protein, 125 aa, synthetic construct
  REGION 1..125: note = Synthetic
QVQLVESGGGVVQPGRSLRLSCAASGFTFSNYGMHWVRQAPGKGLEWLAAVSYDGTNKHYGDSMKGRFTISRDNTKNTLYLQMNSLAAEDTAVYYCAKYHYSGWYRYGTGYFDVWGQGTMVTVSS

SEQ ID NO: 148 - protein, 107 aa, synthetic construct
  REGION 1..107: note = Synthetic
DIQMTQSPSTLSASVGDRVIITCRASQSISDWLAWYQQKPGKAPKLLIYKASNLESGVPSRFSGSGSGTEFTLTISSLQPDDFAIYYCQQYNSYPYTFGQGTKLEIK

SEQ ID NO: 149 - protein, 125 aa, synthetic construct
  REGION 1..125: note = Synthetic
QVQLVESGGGVVQPGRSLRLSCAASGFAFSKYGMHWVRQAPGKGLDWVALISYDGSSNFYADSVKGRFTVSRDNSRNTLYVQMNSLRTEDTAVYFCATESAPGLVGPTTWHFQHWGQGTLVTVSS

SEQ ID NO: 150 - protein, 104 aa, synthetic construct
  REGION 1..104: note = Synthetic
EIVLTQSPGTLSLSPGERATLSCRASQSISSSSLAWYQQIPGQAPRLIISGASNRATGIPDRFSGSGSGTDFTLTISRLEPEDCAIYYCQFTWTFGQGTKVEIK

SEQ ID NO: 151 - protein, 120 aa, synthetic construct
  REGION 1..120: note = Synthetic
QVQLVQSGAEVKKPGASVRVSCKVSGYTLIELSIHWVRQAPGKGLEWMGGFDPEDAKTIYAQKFQGRVTMTEDTSTDTAYMELRSLRSDDTAVYYCATGSPLRGDWLDPWGQGTLVTVSS

SEQ ID NO: 152 - protein, 110 aa, synthetic construct
  REGION 1..110: note = Synthetic
QSVLTQPPSVSAAPGQKVTISCSGSSSDIGNNYVSWYQQLPGTAPKLLIYENNKRPSGIPDRFSGSKSGTSATLGITGLQTGDEADYYCGTWDSRLRTGVFGGGTKLTVL

SEQ ID NO: 153 - protein, 120 aa, synthetic construct
  REGION 1..120: note = Synthetic
QVQLVQSGAEVKRPGASVRVSCKVSGYTLPELSIHWVRQAPGKGLEWVGGFDPEDGDTIYAQKFQGRVTMTEDTSTDTAYMELSSLRAEDTAMYYCAAASPFNIHWFDPWGQGTLVTVSS

SEQ ID NO: 154 - protein, 111 aa, synthetic construct
  REGION 1..111: note = Synthetic
QSVLTQPPSVSAAPGQKVTISCSGSSSNIGNNYVSWYQQLPGTAPKLFIYENNKRPSGIPDRFSGSKSGTSATLGITGLQTGDEAVYYCGTWDRSLSVHYIFGAGTQVNVL

SEQ ID NO: 155 - protein, 126 aa, synthetic construct
  REGION 1..126: note = Synthetic
QVQLVESGGGLVKPGGSLRLSCAASGFTFSSYSMNWVRQAPGKGLEWVSSISSSSSYIYYADSVKGRFTISRDNAKTSLYLQMNSLRAEDAAVYYCAREDEVGPGNYFFYYGMDVWGQGTTVTVSS

SEQ ID NO: 156 - protein, 110 aa, synthetic construct
  REGION 1..110: note = Synthetic
QSVLTQPPSASGTPGQRVTISCSGSSSNIGNNYVYWYQQLPGTAPKLLIYRNNQRPSGVPDRFSGFKSGTSASLAISGLRSEDEADYYCAAWDDRLSGKVFGGGTKLTVL

SEQ ID NO: 157 - protein, 127 aa, synthetic construct
  REGION 1..127: note = Synthetic
QVQLQESGPGLVKPSETLSLTCSVSGGSISTYYWSWIRQPPGKGLEWIGYIYYSGSTNYNPSLKSRVTISVDASKNQFSLNLSSVTAADTAVYYCARGLEFWYYYDSSGPHRWFDPWGQGTLVTVSS

SEQ ID NO: 158 - protein, 115 aa, synthetic construct
  REGION 1..115: note = Synthetic
QPVLTQPSSLSASPGASASLTCTLRSGINVGSYMIYWYQQRPGSPPQYLLRYKSDSDKQQGSGVPSRFSGSKDASANAGILLISGLQSEDEADYYCMIWHSSASVFGGGTKLTVL

SEQ ID NO: 159 - protein, 121 aa, synthetic construct
  REGION 1..121: note = Synthetic
QVQLVESGGGLVKPRGSLRLSCAASGFTFSDYHMGWIRQAPGKGLEWVSYITSSSTSYTNYADSVKGRFTISRDNAKNSLYLQMNSLRAEDTAVYYCARVHGDYDYYMDVWGKGTTVTVSS

SEQ ID NO: 160 - protein, 107 aa, synthetic construct
  REGION 1..107: note = Synthetic
DIQMTQSPSTLSASVGDRVTITCRASQSISSWLAWYQQKPGKAPKLLIYKASSLESGVPSRFSGSGSGTEFTLTISSLQPDDFATYYCQQYNSYSLTFGGGTKVEIK

SEQ ID NO: 161 - protein, 132 aa, synthetic construct
  REGION 1..132: note = Synthetic
QVQLVESGGGVVQPGRSLRLSCAASGFTFSSYGMHWVRQAPGKGLEWVAVIWYDGSNKYYADSVKGRFTISRDNSNNTLHLQMNSLRAEDTAVYYCARDSWEVPRAYYYDSFEYQGLVPDYWGQGTLVTVSS

SEQ ID NO: 162 - protein, 107 aa, synthetic construct
  REGION 1..107: note = Synthetic
DIQMTQSPSSLSASVGDRVTITCRASQDIRNDLGWYQQKPGQAPRLMIYAASSLESGVPSRFSGSGSGTDFTLTISSLQPEDFATYYCLQDYNYPRTFGQGTKLEIK

SEQ ID NO: 163 - protein, 127 aa, synthetic construct
  REGION 1..127: note = Synthetic
QVQLVESGGGVVQPGRSLRLSCAASGFTFSSSGMHWVRQAPGKGLEWVAGIWYDGSNKYYADSVEGRFTISRDNSKNTLYLQMNSLRAEDTAVYYCARDPTDHYDFWSGYYYGMDVWGQGTTVTVSS

SEQ ID NO: 164 - protein, 107 aa, synthetic construct
  REGION 1..107: note = Synthetic
EIVLTQSPATLSLSPGERATLSCRASHSVSSYLAWYQQKPGQAPRLLIYDASKRATGIPARFSGSGSGTGFTLTISSLEAEDFAVYYCQQRSNWSYTFGQGTKLEIK

SEQ ID NO: 165 - protein, 128 aa, synthetic construct
  REGION 1..128: note = Synthetic
QVQLVQSGAEVKKPGASVKVSCKASGYTFTSYYIHWVRQAPGQGLEWMGIINPSGGSTNYAQKFQGRVTMTRDTSTSTVYMEVSSLRSEDTAVYYCARDFTVTTSTTSTNYYYGMDVWGQGTTVTVSS

SEQ ID NO: 166 - protein, 108 aa, synthetic construct
  REGION 1..108: note = Synthetic
SYELTQPPSVSVSPGQTARITCSGDALPKQYAYWYQQKPGQAPVVVIYKDSERPSGIPERFSGSSSGTTVTVTISGVQAEDEGDYYCQSADSSGSYVVFGGGTKLTVL

SEQ ID NO: 167 - protein, 128 aa, synthetic construct
  REGION 1..128: note = Synthetic
QVQLVQSGAEVKKPGSSVKVSCKASGGTFINYAVTWVRQAPGQGLEWMGGIIPILGIPNYAQKFQGRVTITADKSTSTAYMELSSLRSEDTAVYYCARVPQAGAAQGHYYYYYGMDVWGQGTTVTVSS

SEQ ID NO: 168 - protein, 108 aa, synthetic construct
  REGION 1..108: note = Synthetic
EIVLTQSPGTLSLSPGERATLSCRASQSVTSSYLAWYQQKPGQAPRLLIYGASSRVTGIPDRFSGSGSGTDFTLTISRLEPEDFAVYYCQQYGSSPLTFGGGTKVEIK

SEQ ID NO: 169 - protein, 124 aa, synthetic construct
  REGION 1..124: note = Synthetic
EVQLVESGGGLVQPGGSLRLSCAASGFTFNNYWMSWVRQAPGKGLEWVANINQDGSEKYYVDSVMGRFAISRDNAKNSLYLQMNSLRAEDTAVYYCARDQGYGDYFEYNWFDPWGQGTLVTVSS

SEQ ID NO: 170 - protein, 107 aa, synthetic construct
  REGION 1..107: note = Synthetic
DIQLTQSPSFLSASVGDRVTITCRASQGIYSYLAWYQQKPGKAPKLLIYAASTLQSGVPSRFSGSGSGTEFTLTISSLQPEDFATYYCQQLNSYPITFGQGTRLEIK

SEQ ID NO: 171 - protein, 124 aa, synthetic construct
  REGION 1..124: note = Synthetic
EVQLLESGGGLVQPGGSLRLSCAASGFTFSSYAMNWVRQAPGKGLEWVSAISGSGDSTYYADSVKGRFTISRDNSKNTLYLQMNSLRAEDTAVYYCAKAERIIMMVVVTLFDYWGQGTLVTVSS

SEQ ID NO: 172 - protein, 110 aa, synthetic construct
  REGION 1..110: note = Synthetic
QSVLTQPPSVSAAPGQKVTISCSGSSSNIGNNYVSWYQQLPGTAPKLLIYENNKRPSGIPDRFSGSKSGTSATLGITGLQTGDEADYYCGTWDSSLSAWVFGGGTKLTVL

SEQ ID NO: 173 - protein, 123 aa, synthetic construct
  REGION 1..123: note = Synthetic
QVQLVQSGAEVKKPGASVKVSCKVSGYTLPELSMHWVRQAPGKGLEWMGGFDPEDGETIYAQKFQGRVTMTEDTSTDTAYMELSSLRSEDTAVYFCATSSALMTTVTTWFDPWGQGTLVTVSS

SEQ ID NO: 174 - protein, 111 aa, synthetic construct
  REGION 1..111: note = Synthetic
QSVLTQPPSVSAAPGQKVTISCSGSSSNIGNNYVSWYQQLPGTAPKLLIYENNKRPSGIPDRFSGSKSGTSATLGITGLQTGDEADYYCGTWDSSLSAGAVFGGGTKLTVL

SEQ ID NO: 175 - protein, 126 aa, synthetic construct
  REGION 1..126: note = Synthetic
QVQLVQSGAEVKKPGASVKVSCKASGYTFTGYYIHWMRQAPGQGLEWVGRINPDNGGGNSAQKFLGRVTMTTDTSINTAYMELSGLTPDDTAVYFCARDYVLVWFGELLTNYFDAWGQGTLVTVSS

SEQ ID NO: 176 - protein, 110 aa, synthetic construct
  REGION 1..110: note = Synthetic
QSVLTQPPSASGTPGQRVTISCSGSSSNIGSNNVYWYQQLPGTAPKLLIYRSNQRPSGVSARFSGSKSGTSASLAISGLRPDDEAHYHCATWDDSLSVVVFGGGTKVTVL

SEQ ID NO: 177 - protein, 121 aa, synthetic construct
  REGION 1..121: note = Synthetic
EVQLVESGGVVVQPGGSQRLSCAASGFTFDYYAMHWVRQAPGKGLEWVSLISWDGTNTYYADSVKGRFTISRDNNKNSLYLQMNSLRAEDTALYYCARGEGSAGYSFPGYWGQGTLVTVSS

SEQ ID NO: 178 - protein, 110 aa, synthetic construct
  REGION 1..110: note = Synthetic
QSVLTQPPSASGTPGQRVTISCSGSSSNIGSNYVYWYQQLPGTAPKLLIYRNNQRPSGVPDRCSGSKSGTSASLAISGLRSEDEADYYCATWDDSLSGVVFGGGTKLTVL

SEQ ID NO: 179 - protein, 121 aa, synthetic construct
  REGION 1..121: note = Synthetic
QVQLVQSGAEVKKPGASVKVSCKVFGFTLIELSIHWVRQAPGKGLEWMGGFDPEDAETIYAQKFQGRVTMTEDTSTDTAYMELSSLRSEDTAVYYCATVGQRQLEGWFDPWGQGTLVTVSS

SEQ ID NO: 180 - protein, 111 aa, synthetic construct
  REGION 1..111: note = Synthetic
QSALTQPPSASGSPGQSVTISCTGTSSDVGGYNYVSWYQQHPGKAPKLMIYEVSKRPSGVPDRFSGSKSGNTASLIVSGLQAEDEADYYCSSYAGSNNPFVFGSGTKVTVL

SEQ ID NO: 181 - protein, 121 aa, synthetic construct
  REGION 1..121: note = Synthetic
QVQLVQSGAEVKKPGASVKVSCKVSGYTLIELSMHWVRQAPGKGLEWMGGFDPEDGETIYAQKFQGRVTMTEDTSTDTAYMELSSLRSEDTAVYYCAVNSAEVTTYWFDPWGQGTLVTVSS

SEQ ID NO: 182 - protein, 110 aa, synthetic construct
  REGION 1..110: note = Synthetic
QSALTQPPSVSGSPGQSVTISCTGTSSDVGSYDRVSWYRQPPGTAPKLMIYEVSNRPSGVPDRFSGSKSGNTASLTISGLQAEDEADYYCTSYTSSSPVVFGGGTKLTVL

SEQ ID NO: 183 - protein, 121 aa, synthetic construct
  REGION 1..121: note = Synthetic
QVQLVQSGAEVKKPGASVKVSCKVSGYTITEISIHWVRQAPGKGLEWMGGFDPEDGETIYAQRFQGRVTMTEDTSTDTAYMELSNVRSEDTAVYYCAMSPAIISSYWFDPWGQGTLVTVSS

SEQ ID NO: 184 - protein, 112 aa, synthetic construct
  REGION 1..112: note = Synthetic
QSALTQPASVSGSPGQSITISCTGTSSDVGGYNSVSWYQQHPGKAPKLMIYDVTNRPSGVSNRFSGSKSGNTASLTISGLQAEDEADYYCSSYTNSSTPDYVFGTGTKVTVL

SEQ ID NO: 185 - protein, 120 aa, synthetic construct
  REGION 1..120: note = Synthetic
EVQLVESGGGLVQPGGSLRLSCAASGFTFSSYWMSWVRQAPGKGLEWVANIKQDGSEKYYVDSVKGRFTISRDNAKNSLYLQMNSLRAEDTAVYYCARPPDYPLPYFDYWGQGTLVTVSS

SEQ ID NO: 186 - protein, 106 aa, synthetic construct
  REGION 1..106: note = Synthetic
SYELTQPPSVSVSPGQTASITCSGDKLGDKFACWYQHKPGQSPVLVISQDTKRPSGIPERFSGSNSGNTATLTISGTQAMDEADYYCQAWDSNSYVFGTGTRVTVL

SEQ ID NO: 187 - protein, 120 aa, synthetic construct
  REGION 1..120: note = Synthetic
EVQLVESGGGLVQPGRSLRLSCAASGFTFDDYAMHWVRQAPGKGLEWVSGISWNSGSIGYADSVKGRFTISRDNAKNSLYLQMNSLRTEDTALYYCAKDMGYSSGTLDYWGQGTLVTVSS

SEQ ID NO: 188 - protein, 110 aa, synthetic construct
  REGION 1..110: note = Synthetic
QSVLTQPPSASGTPGQRVTISCSGSSSNIGSNYVYWYQQLPGTAPKLLIYRNNQRPSGVPDRFSGSKSGTSASLAISGLRSEDEADYYCAAWDDSLSGVVFGGGTKLTVL

SEQ ID NO: 189 - protein, 120 aa, synthetic construct
  REGION 1..120: note = Synthetic
QVQLVESGGGVVQPGRSLRLSCAASGFTFSSYAFHWVRQAPGKGLEWVAVISYDGSNKYYADSVKGRFTISRDNSKNTLYLQMNSLRTEDTAVYYCARNYYDSSDAFDIWGQGTMVTVSS

SEQ ID NO: 190 - protein, 107 aa, synthetic construct
  REGION 1..107: note = Synthetic
SYELTQPPSVSVSPGQTARITCSGDALPKQYAYWYQQKPGQAPVLVIHKDSERPSGIPERFSGSSSGTTVTLTISGVQAEDEADYYCQSADSSGTYLFGGGTKLTVL

SEQ ID NO: 191 - protein, 120 aa, synthetic construct
  REGION 1..120: note = Synthetic
QVQLVESGGGVVQPGRSLRLSCAASGFTFSSYAMHWVRQAPGKGLEWVAVISYDGSNQYYADSVKGRFTISRDNSKNTLYLQMNSLRAEDTAVYYCARNYYDSSDAFDIWGQGTMVTVSS

SEQ ID NO: 192 - protein, 107 aa, synthetic construct
  REGION 1..107: note = Synthetic
SYELTQPPSVSVSPGQTARITCSADALPKQYAYWYQQKPGQAPVLVIYKDTERPSGIPERFSGSTSGTTVTLTISGVQAEDEADYYCQSADSSGTYVFGTGTKVTVL

SEQ ID NO: 193 - protein, 123 aa, synthetic construct
  REGION 1..123: note = Synthetic
EVQLVESGGDLVQPGGSLRLSCVVSGFTFSSYSMNWVRQAPGKGLEWVSHISSSSSTIYYADSVKGRLTISRDNAKNSLYLQMNSLRAEDTAVYYCARDWCGRTSCHYYMDVWGKGTTVTVSS

SEQ ID NO: 194 - protein, 112 aa, synthetic construct
  REGION 1..112: note = Synthetic
QSALTQPASVSGSPGQSITISCTGTSSDVGSYNLVSWYQQHPGKAPKLMIYEGSKRPSGVSNRFSGSKSGNTASLTISGLQAEDEADYYCCSYAGSSTLPYVFGTGTKVTVL

SEQ ID NO: 195 - protein, 123 aa, synthetic construct
  REGION 1..123: note = Synthetic
EVQLVESGGGLVQPGGSLRLSCAVSGFTFSNYSMNWVRQAPGKGLEWVSYISSSSSTIYYADSVKGRFTISRDNAKNSLYLQMNSLRAEDTAVYYCARERAARLYYYYYMDVWGKGTTVTVSS

SEQ ID NO: 196 - protein, 112 aa, synthetic construct
  REGION 1..112: note = Synthetic
QSALTQPASVSGSPGQSITISCTGTSSDVGSYNLVSWYQQHPGKAPKLMIYDVSKRPSGVSNRFSGSKSGNTASLTISGLQAEDEADYYCCSYAGSSTSHVVFGGGTKLTVL

SEQ ID NO: 197 - protein, 132 aa, synthetic construct
  REGION 1..132: note = Synthetic
QVQLVESGGGVVQPGRSLRLSCAASGFTFSSYGMHWVRQAPGKGLEWVAVIWYDGSNEYYADSVKGRFTISKDNSKNTLYLQMNSLRADDTAVYYCARDSWEVPRYYYYDSTDYQGLVPDHWGQGTLVTVSS

SEQ ID NO: 198 - protein, 107 aa, synthetic construct
  REGION 1..107: note = Synthetic
DIQMTQSPSSLSASVGDRVTITCRASQGIRNDLGWYQQKPGKAPKLLIYAASSLQSGVPSRFSGSGSGTDFTLTISSLQPEDFATYYCLQDYNYPRTFGQGTKLEIK

SEQ ID NO: 199 - protein, 121 aa, synthetic construct
  REGION 1..121: note = Synthetic
QVQLVESGGGLVKPRGSLRLSCAASGFTFSDYHMGWIRQAPGKGLEWLSYITNSSPGDTNYADSVKGRFAISRDNAKNSLYLQMNSLRPEDTAVYYCARVHGDYDYYMDVWGKGTTVTVSS

SEQ ID NO: 200 - protein, 107 aa, synthetic construct
  REGION 1..107: note = Synthetic
DIQMTQSPSTLSASVGDRVTITCRASQSISSWLAWYQQKPGKAPKLLIYKASILESGVPSTFSGSGSGTEFTLTISSLQPDDFATYYCQQYSSYSLTFGGGTKVEIK

SEQ ID NO: 201 - protein, 132 aa, synthetic construct
  REGION 1..132: note = Synthetic
QVQLVESGGGVVQPGGSLRLSCAASGFTFTSYGIHWVRQAPGKGLEWVAMIWYDGSNKYYADSVKGRFTISRDDSMNTLLLQMNSLRAEDTAVYYCARDSWEVPRYYYYDSTAYQGMVPDFWGQGTLVTVSS

SEQ ID NO: 202 - protein, 106 aa, synthetic construct
  REGION 1..106: note = Synthetic
DIQMTQSPSSLSASVGDRVTITCRASQDIRNDLGWYQQKPGKAPKLLIYAASSLQSGVPSRFSGSGSGTEFTLTISTLQPEDFATYYCLQDFNYPRTFGQGTKLEI

SEQ ID NO: 203 - protein, 127 aa, synthetic construct
  REGION 1..127: note = Synthetic
QVQLVESGGGVVQPGRSLRLSCAASGFTFSNSGMNWVRQAPGKGLEWVALIGYDGSNKYYVDSVKGRFTISRDNPKNMLYLQMSSLRAEDTAVYYCARDPTDDYDLWSGYYYGMDIWGQGTTVTVSS

SEQ ID NO: 204 - protein, 107 aa, synthetic construct
  REGION 1..107: note = Synthetic
EIVLTQSPATLSLSPGERATLSCRASQSVSSYLAWYQQKPGQAPRLLIYDASNRATGIPARFSGSGSGTGFTLTISSLEPEDFAVYFCQQRGNWSYTFGQGTKLEIK

SEQ ID NO: 205 - protein, 125 aa, synthetic construct
  REGION 1..125: note = Synthetic
EVQLLESGGGLVQPGGSLRLSCAASGFTFSNFVMSWVRQAPGKGLEWVSAISGSGGSIYYSGSVKGRFTISRDNSKNTLYLQMNSLRAEDTAVYYCAKEGDSSTWYYYYYYMDVWGQGATVTVSS

SEQ ID NO: 206 - protein, 112 aa, synthetic construct
  REGION 1..112: note = Synthetic
QSALTQPASVSGSPGQSITISCTGTSSDIGSYNLVSWYQQHPGKAPKLMIYDVTKRPSGVSNRFSGSKSGNTASLTISGLQAEDEADYYCCSYAGSNTFYVVFGGGTKLTVL

SEQ ID NO: 207 - protein, 126 aa, synthetic construct
  REGION 1..126: note = Synthetic
EVQLVESGGGLVKPGGSLRLSCAASGFSFNNSNMNWVRQAPGKGLEWVSSISSSSNYIYYVDSVKGRFTISRDNAKNSLYLQMSSLRVEDTAVYYCASAQSSARWGGYYQYAMDVWGQGTTVTVSS

SEQ ID NO: 208 - protein, 107 aa, synthetic construct
  REGION 1..107: note = Synthetic
EIVMTQSPATLSVSPGERATLSCRASQSVSSSLAWYQQKPGQAPRLLIYDASTRATGIPARFSGRGSGTEFTLTISSLQSEDFAVYYCQQYYNWPPWTFGQGTKVEI

SEQ ID NO: 209 - protein, 128 aa, synthetic construct
  REGION 1..128: note = Synthetic
QVQLVQSGAEVKKPGASVKVSCKASGYTFTRYYMHWVRQAPGQGLEWMGIINPSGGSTSYAQKFQGRVTMTRDTSTSTVCMELSSLRSEDTAVYYCARDFTETTVTTSTNYYYGMDVWGQGTTVTVSS

SEQ ID NO: 210 - protein, 108 aa, synthetic construct
  REGION 1..108: note = Synthetic
SYELTQPPSVSVSPGQTARITCSGDALPKQYAYWYQQKPGQAPVLVIYKDIERPSGIPERLSGSSSGTIVTLTISGVQAEDEADYYCQSADSSGSYVVFGGGTKLTVL

SEQ ID NO: 211 - protein, 128 aa, synthetic construct
  REGION 1..128: note = Synthetic
QVQLVQSGAEVKKPGSSVKVSCKASGGTFINDAITWVRQAPGQGLEWMGGIIPILDIANYAQKFQGRVTITADKSTSTAYMELNSLRSDDTAVFYCARVPQAGAARGHFYYYHGLDVWGQGTTVTVSS

SEQ ID NO: 212 - protein, 108 aa, synthetic construct
  REGION 1..108: note = Synthetic
EIVLTQSPGTLSLSPGERATLSCRTSQSVSNNYLAWYQQKLGQAPRLLIYGASSRATGIPDRFSGSGSGTDFTLIISRLEPEDFAVYYCQQYGSSPLTFGGGTRVEIK

SEQ ID NO: 213 - protein, 123 aa, synthetic construct
  REGION 1..123: note = Synthetic
QVQLVESGGGVVQPGRSLRLSCAASGFTFSSHGMHWVRQAPGKGLEWVAIISFDGSNTDYADSVKGRFTISRDNSKNTLYLQMNNLRVEDTAVYYCAKDKDDGWYFINYFDYWGQGTLVTVSS

SEQ ID NO: 214 - protein, 109 aa, synthetic construct
  REGION 1..109: note = Synthetic
EIVLTQSPGTLSLSPGQRATLSCRASQSLSSNYLAWYQLRPGQAPRLLIYGASTRATGIPDRFSGSGSGTDFTLTISRLEPEDFAVYYCHHYGTSPGFTFGPGTKVDIK

SEQ ID NO: 215 - protein, 124 aa, synthetic construct
  REGION 1..124: note = Synthetic
QVQLVQSGAEVKKPGASVKVSCKVSGYTLIELSIHWVRQAPGKGLEWMGGFHPEEAKTIYAQNFQGRVTMTEDTSTDTAYMELTSLRSEDTAVYYCATGGPVCSTCYISWFDPWGQGTLVTVSS

SEQ ID NO: 216 - protein, 112 aa, synthetic construct
  REGION 1..112: note = Synthetic
QSVLTQPPSVSAAPGQKVTISCSGSSSNIGNNYVSWYQQLPGTAPKLVIYENNKRPPGIPDRFSGSKSGTSATLGITGLQTGDEADYYCGTWDSSLSAFDVIFGGGTKLTVL

SEQ ID NO: 217 - protein, 124 aa, synthetic construct
  REGION 1..124: note = Synthetic
EVQLVESGGGLVRPGGSLRLSCAASGFIFNDYWMSWVRQAPGKGLEWVANINQDGSETYYVDSMRGRFTISRDNAGKSLHLQMSSLRPEDTAVYYCARDQGYGHYLEYNWFDPRGQGTLVTVSS

SEQ ID NO: 218 - protein, 107 aa, synthetic construct
  REGION 1..107: note = Synthetic
DIQLTQSPSFLSASVGDRVTITCRASQVISSYLAWYQQKPGKAPKSLIYAASTLQSGVPSRFSGSGSGTEFTLTISSLQPEDFATYYCQQLHSYPITFGQGTRLEIK

SEQ ID NO: 219 - protein, 124 aa, synthetic construct
  REGION 1..124: note = Synthetic
EVQLLESGGGLVQPGGSLRLSCAASGFTFSKYAMSWVRQAPGKGLEWLSAISGSGDSTFYADSVKGRFTISRDNSKNTLYLQMNSLRAEDTAIYYCAKAERITMIVVLTLFDYWGQGTLVTVSS

SEQ ID NO: 220 - protein, 110 aa, synthetic construct
  REGION 1..110: note = Synthetic
QSVLTQPPSVSAAPGQKVTISCSGSSSSIGNNYVSWYQQLPGTAPKLLIYENNKRPSGIPDRFSGSKSGTSATLGIIGLQTGDEADYYCGTWDSSLSAWVFGGGTKLTVL

SEQ ID NO: 221 - protein, 125 aa, synthetic construct
  REGION 1..125: note = Synthetic
EVQLVESGGGLVKPGGSLRLSCGVAGFTFNSYTMNWVRQAPGKGLEWVSAISTTTNSIYYSDSVKGRFTISRDNAENSLYLQMSSLRVEDTAVYYCARSGLGMQLWLESYYFDHWGQGTLVTVSS

SEQ ID NO: 222 - protein, 112 aa, synthetic construct
  REGION 1..112: note = Synthetic
QSALTQPASVSGSPGQSITISCTGTSSDVGTYNLVSWYQHHPGKAPKVMIYDVSKRPSGISNRFSGSKSGNTASLTISSLQAEDEADYYCCSYAGSSTLNVVFGGGTKLTVL

SEQ ID NO: 223 - protein, 125 aa, synthetic construct
  REGION 1..125: note = Synthetic
EVQLLESGGGLVKPGGSLRISCTASGFTFSNYAMTWVRQAPGKGLEWVSSISGSGGSIYYADSVKGRFTISRDNSKNTMFLQLNSLRTEDTAVYYCAKDFGTLQWFGEAYSFDYWGQGTLVTVSS

SEQ ID NO: 224 - protein, 112 aa, synthetic construct
  REGION 1..112: note = Synthetic
QSALTQPASVSGSPGQSITISCTGTSSDVEGYDLVSWYQQHPGKAPKLIIYDVTKRPSGVSNRFSGSKSGNTAALTISGLQAEDEADYYCCSYAGSTTRPVVFGGGTELTVL

SEQ ID NO: 225 - protein, 131 aa, synthetic construct
  REGION 1..131: note = Synthetic
EVQLVESGGGLVKPGGSLRLSCAASGFNFNKAWMGWVRQAPGKGLEWVGRIKSEIDAGTTDYSAPVKGRFTISRDDSENTLYLEMNSLKVEDTGVYYCTTAQFQVPRFVWVGDLMNYFDNWGQGALVTVSS

SEQ ID NO: 226 - protein, 107 aa, synthetic construct
  REGION 1..107: note = Synthetic
EIVLTQSPGTLSLSPGERATLSCRASQSVSSNYLAWYQQKPGQAPRLLIYGASGRATGIPDRFSGSGSGTDFTLTISRLEPEDFAVYYCQQYDNSPLTFGGGTKVEI

SEQ ID NO: 227 - protein, 125 aa, synthetic construct
  REGION 1..125: note = Synthetic
EVQLVESGGGLVKPGGSLRLSCVASGFTFSSHNMNWVRQAPGKGLEWVSFISTSSSSIYYADSVKGRFTISRDNAKNSLYLQMSSLRAEDTAVYYCSRDPPSPTNYYYYYYMDVWGKGTTVTVSS

SEQ ID NO: 228 - protein, 112 aa, synthetic construct
  REGION 1..112: note = Synthetic
QSALTQPASVSGSPGQSITMSCTGTSSDVGSYNLVSWYQQHPGKAPKLMIYDVSKRPSGVSIRFSGSKSGNTASLTISGLQAEDEADYYCCSYAGITTFPYVFGTGTKVTVL

SEQ ID NO: 229 - protein, 123 aa, synthetic construct
  REGION 1..123: note = Synthetic
QLQLQESGPGLVKPAETLSLTCTVSGGSISSSNYYWGWIRQPPGKGLEWIGNIFYSGITYYNPSLKGRVSISVDTSKNQFSLKVSSVTVADTAVYYCARDVETTLYLGTLDIWGPGTMVTVSS

SEQ ID NO: 230 - protein, 107 aa, synthetic construct
  REGION 1..107: note = Synthetic
DIQMTQSPSSLSASVGDRVTITCRASQGIRNDLGWYQQKPGKAPKRLIYAASNLQSGVPSRFSGSGSGTEFTLTISSLQPEDFATYFCLQHNSYPQSFGQGTKVEIK

SEQ ID NO: 231 - protein, 121 aa, synthetic construct
  REGION 1..121: note = Synthetic
EVQLVESGGVVVQPGGSLRLSCAASGFTFDYHAMHWVRQAPGKGLEWVSLISWDGTNTYYADSVKGRFTISRDNSKNSLYLQMNSLRGEDTALYYCARGEGAAGYSFPDYWGQGTLVTVSS

SEQ ID NO: 232 - protein, 109 aa, synthetic construct
  REGION 1..109: note = Synthetic
QSVLTQPPSASGTPGQRVTISCSGSSSNIGSNYVYWYQQLPGTAPKLLIYRNNQRPSGVPDRFSGSKSGTSVSLAISGLRSDDEADYYCASWDDSLRGVVFGGGTKVTV

SEQ ID NO: 233 - protein, 126 aa, synthetic construct
  REGION 1..126: note = Synthetic
EVQLLESGGGLVQPGGSLRLSCAASGFTFNKYAMSWVRQAPGKGLEWVSGIGGSGGTIYYADSVKGRFTISRDSSKNTLYLQMNSLRADDTAVYYCAKDSVWKVLVIIAGGYFDYWGQGTLVTVSS

SEQ ID NO: 234 - protein, 107 aa, synthetic construct
  REGION 1..107: note = Synthetic
DIQMTQSPSSLSASVGDRVTITCRASQGISSYLNWYQQKPGKAPKLLIYAATSLQSGVPSRFSGSGSGTDFTLTISNLQSEDFATYYCQQSYSTPPTFGQGTKVEIK

SEQ ID NO: 235 - protein, 126 aa, synthetic construct
  REGION 1..126: note = Synthetic
QVQLVQSGAEVKKPGASVKVSCKASGYTLTSYGISWVRQAPGQGLEWMGWISAHNGNTNYAQKFQGRVTMTTDTSTSTAYMELRNLRSDDTAVYYCARFLALTYYYDSSGYPFDYWGQGSLVTVSS

SEQ ID NO: 236 - protein, 109 aa, synthetic construct
  REGION 1..109: note = Synthetic
DIQMTQSPSSLSASVGDRITITCRASQSISSYLNWYQQKPGKAPKLLIYAASSLQSGVPSRFSGSGSGTDFTLTISSLQPEDFATYYCQQSYSTPRMYTFGQGTKLEIK

SEQ ID NO: 237 - protein, 126 aa, synthetic construct
  REGION 1..126: note = Synthetic
QVQLVQSGAEVKKPGASVKVSCKISEYTLIELSIHWVRQAPGKGLEWMGGFDPEDVKTIYAQKFQGRITMTEDTSTDTAYMELSSLRSEDTAVYYCVASRGPAYPSVVVTSQFDFWGQGTLVTVSS

SEQ ID NO: 238 - protein, 108 aa, synthetic construct
  REGION 1..108: note = Synthetic
EIVLTQSPATLSLSPGERATLSCRASQSVSSNYLAWYQQKPGQAPRLLIYGASSRATGIPGRFSGSGSGTDFTLTISRLEPEDFAVYYCQQYGSSPITFGQGTRLEIK

SEQ ID NO: 239 - protein, 126 aa, synthetic construct
  REGION 1..126: note = Synthetic
EVQLLESGGGLVQPGGSLRLSCAASGFPFSSYAMSWVRQAPGKGLEWVSGIKISGGSTHYADSVKGRFTISRDNSKNTLYLQMNSLRVEDTGVYYCAKDRPPRWVAAAGMGAFDIWGHGTMVTVSS

SEQ ID NO: 240 - protein, 108 aa, synthetic construct
  REGION 1..108: note = Synthetic
SYELTQPPSVSVAPGKTARITCGGYNIGSKSVHWYQQKPGQAPVLVIYYDTDRPSGIPERFSGSNSGNTATLTINRVQAGDEADYYCQIWDSSSDNWVFGGGTELTVL

SEQ ID NO: 241 - protein, 123 aa, synthetic construct
  REGION 1..123: note = Synthetic
QVQLVQSGAEVKKPGASVKVSCKASGYTSTRYGFSWVRQAPGQGLEWMGWISTYNGNTDYAQKFQGRVTMTTDTSTSTAYMELRSLRSDDTAVYYCARVFESSGRRPGWFGPWGQGTLVTVSS

SEQ ID NO: 242 - protein, 106 aa, synthetic construct
  REGION 1..106: note = Synthetic
DIQMTQSPSSLSASVGDRVTITCRASQGISNSLAWYQQKPGKAPKLLLYAASRLESGVPSRFSGSGSGTDYTLTISSLQPEDFATYYCQQYYSTPSTFGQGTKVEI

SEQ ID NO: 243 - protein, 121 aa, synthetic construct
  REGION 1..121: note = Synthetic
QVQLVQSGAEVKKPGASVKVSCKVSGYTLIELSIYWVRQAPGKGLEWMGGFDPEDGETIYAQKFQGRVTMTEDTSTDTAYMELNNLRSEDTAVYHCAAAPPRGRPGWFDPWGQGTLVTVSS

SEQ ID NO: 244 - protein, 112 aa, synthetic construct
  REGION 1..112: note = Synthetic
QSALTQPASVSGSPGQSITISCTGTSSDVGGYNCVSWYQQHPGKAPKLVIYDVSNRPSGVSNRFSGSKSGNTASLTISGLQAEDEADYYCSSYTNSSTRGVVFGGGTKLTVL

SEQ ID NO: 245 - protein, 120 aa, synthetic construct
  REGION 1..120: note = Synthetic
EVQLVESGGGLVQPGGSLRLSCVASEFTFSDYWMTWVRQAPGKGLEWVATIKQDGSETYFVDSVRGRFTISRDNAKNSLYLQMNSLRADDTAVYYCARDHGDYDLFFDLWGRGSLVTVSS

SEQ ID NO: 246 - protein, 107 aa, synthetic construct
  REGION 1..107: note = Synthetic
DIQMTQSPSTLSASVGDRVTITCRASQSISTWLAWYQQKAGKAPKLLIYKASSLESGVPSRFSGSGSGTEFTLTISGLQPDDFATYYCQQYSTYSQTFGQGTKLEIK

SEQ ID NO: 247 - protein, 123 aa, synthetic construct
  REGION 1..123: note = Synthetic
QLQLQESGPGLVKPSETLSLTCIVSGGSISSTYYWGWIRQSPGKGLEWIGSIYSSGTTYYNPSLKSRVTISMDTSKNQVSLKLTSVTTADTAVYYCARDPWVPGVLYHWFDPWGQGTLVTVSS

SEQ ID NO: 248 - protein, 109 aa, synthetic construct
  REGION 1..109: note = Synthetic
SYELTQPPSVSVAPGQTARITCGGSNIGGKTVHWYQQKAGQAPVLVVDDDSDRPSGIPERFSGSNSGNTATLTISRVEAGDEADYYCQVWDSSSDHLYVFGTGTKVTVL

SEQ ID NO: 249 - protein, 120 aa, synthetic construct
  REGION 1..120: note = Synthetic
EVQLLESGGGLVQPGGSLRLSCAASGFTFNSYAMSWVRQAPGRGLEWVSNISGSGGSTYYADSVTGRFTITRDNSKNTLYLQMNSLRVEDTAIYYCAKGYSGYDLVFDYWGQGSLVTVSS

SEQ ID NO: 250 - protein, 106 aa, synthetic construct
  REGION 1..106: note = Synthetic
DIQMTQSPSTLSASVGDRVTITCRASQSISSWLAWYQQKPGKAPKLLIYKASNLESGVPSRFSGSGSGTEFTLTISSLQPDDFATYYCQQYNGYFTFGGGTKVEIK

SEQ ID NO: 251 - protein, 128 aa, synthetic construct
  REGION 1..128: note = Synthetic
EVQLVESGGGLVKPGGSLRLSCATSGFTFSNYNMNWVRQAPGKGLEWVSSISSGGNFIYYIDSVKGRFTISRDNAKSSLYLQMNSLRAEDTAVYYCARDAPQSYSVNSGYYPSPSDSWGQGTLVTVSS

SEQ ID NO: 252 - protein, 108 aa, synthetic construct
  REGION 1..108: note = Synthetic
EIVMTQSPVTLSVSPGERATLSCRASQSVSSNLAWYQQRPGQAPRLLVYGASTRATGIPVRFSGSGSGTEFTLTISSLQSEDFAVYYCQHYYNWPPYTFGQGTKLEIK

SEQ ID NO: 253 - protein, 127 aa, synthetic construct
  REGION 1..127: note = Synthetic
EVQLLESGGDLVQPGGSLRLSCEASGFPFSSYAVNWVRQAPGKGLEWVSAISGSGGSIYYADSVKGRFTISRDNPKNTLYLQMNSLRADDTAVYYCTKDAYDYGSKNHFYYYYYMDVWGKGTTVTVS

SEQ ID NO: 254 - protein, 107 aa, synthetic construct
  REGION 1..107: note = Synthetic
EIVLTQSPGTLSLSPGERATLSCRASQSVTSNYLAWYQQKLGQAPRLLIYGASSRATGIPDRFSGSGSGTGFTLTISRLEPEDLAVYYCQQYGSSPSFGPGTKVDIK

SEQ ID NO: 255 - protein, 121 aa, synthetic construct
  REGION 1..121: note = Synthetic
QVQLVQSGAEVKKPGASVKVSCKVSGYTLTELSIHWVRQAPGKGLEWMGGFDPEDVETIYAQKFQGRVTMTEDTSTDTAYMELSSLRSEDTAVYYCATHYAAAGRGLVDYWGQGTLVTVSS

SEQ ID NO: 256 - protein, 110 aa, synthetic construct
  REGION 1..110: note = Synthetic
QSVLTQPPSVSAAPGQKVTISCSGSSSNIGNNYVSWYQQLPGTAPKLLIYENNKRPSGIPDRFSGSKSGTSATLGITGLQTGDEADYYCGTWDSSLSAGVFGGGTKLTVL

SEQ ID NO: 257 - protein, 128 aa, synthetic construct
  REGION 1..128: note = Synthetic
QVQLVQSGAEVKKPGASVKVSCKVSGYTLTELSIHWVRQAPGKGLEWMGGFDPEDAETIYAQKFQGRVTMTEDTSTDTAYMELSSLRSEDTAVYYCAAGVAVAGTKGDYYYYYGMDFWGQGTTVTVSS

SEQ ID NO: 258 - protein, 107 aa, synthetic construct
  REGION 1..107: note = Synthetic
DIQMTQSPSSLSASVGDRVTITCRASQGIRNYLAWFQQKPGKAPKSLIYAASSLQSGVPSKFSGSGSGTDFTLTISSLQPEDFATYYCQQYNSYPRTFGQGTKVEIK

SEQ ID NO: 259 - protein, 123 aa, synthetic construct
  REGION 1..123: note = Synthetic
QLQLQESGPGLVKPSETLSLTCTVSGGSISTNNYFWGWIRQPPGKGLEWIGTVYYSGSTYYNPSLRSRVTISVDTSKNHFSLRLTSVTAADTAVYYCATYFRGYTVDEGFDPWGQGTLVTVSS

SEQ ID NO: 260 - protein, 107 aa, synthetic construct
  REGION 1..107: note = Synthetic
DIQMTQSPSSLSASVGDRVTITCRASQGIRNDLGWYQQKPGKAPKRLIYAASSLQSGVPSRFSGSGSGTEFTLTISSLQPEDFATYFCLQYNSYPLTFGGGTKVEIK

SEQ ID NO: 261 - protein, 121 aa, synthetic construct
  REGION 1..121: note = Synthetic
EVQLVQSGAEVKKPGESLRISCQGSGYGFTSYWISWVRQMPGKGLEWMGRIDPSDSYTNYSPSFQGHVTISPDKSISTAYLQWSSLKASDTAMYYCARHRTGTPYDAFDIWGQGTMVTVSS

SEQ ID NO: 262 - protein, 107 aa, synthetic construct
  REGION 1..107: note = Synthetic
DIQMTQSPSSLSASVGDRVTITCQASQDISNYLNWYQQKPGKAPKLLIYDAFNLETGVPARFSGSGSGTDFTFTISSLQPEDVATYYCQQYENVEITFGPGTKVDIK

SEQ ID NO: 263 - protein, 127 aa, synthetic construct
  REGION 1..127: note = Synthetic
QVQLVESGGGVVQPGRSLRLSCAASGFIFSNYGMHWVRQAPGKGLEWVAVISYDGSNKYYEDSVKGRFTISRDNSKNTLYLQMNSLRPEDTAVYYCAKDRWVGIRRVAPISGGFDYWGQGTLVTVSS

SEQ ID NO: 264 - protein, 107 aa, synthetic construct
  REGION 1..107: note = Synthetic
DIQMTQSPSSLSASVGDRVTITCRASQGIKNDLGWYQQKPGKAPKHLIYDASSLQSGVPSRFSGSGSGTEFTLTISSLQPEDFATYYCLQHYSYPLTFGGGTKVEIK

SEQ ID NO: 265 - protein, 124 aa, synthetic construct
  REGION 1..124: note = Synthetic
EVQLVESGGGLVKPGGSLRLSCAASGFTFSNAWMSWVRQAPGKGLEWVGRIKSKTDGGTTDYATPVKGRFTISRDDSKTGLYLQMNSLKTEDTAVYYCTTETSGYLEAVAFDIWGQGTMVTVSS

SEQ ID NO: 266 - protein, 104 aa, synthetic construct
  REGION 1..104: note = Synthetic
SYELTQPPSVSVAPGKTARITCGGNNIGSKSVHWYQQKPGQAPVLVVYDDSDRPSGIPERFSGSNSGNTATLTISRVEAGDEADYYCQVWDNCGVFGGGTKLTV

SEQ ID NO: 267 - protein, 122 aa, synthetic construct
  REGION 1..122: note = Synthetic
QVQLVESGGGVVQPGKSLRLSCAASGFTFSNYAMHWVRQAPGKGLEWVALISYDGNNKYYADSVKGRFTISRDNSKNTLYLQMNSLRAEDTAVYYCARDHGYSGSRSPLGYWGQGTLVTVSS

SEQ ID NO: 268 - protein, 107 aa, synthetic construct
  REGION 1..107: note = Synthetic
DIQMTQSPSSLSASVGDRVTITCRASQSISIYLNWYQQKPGKAPKLLIYAASSLQSGVPSRFSGSGSGTDFTLTISSLQPEDFATYYCQQSYSTPGTFGQGTKVEIK

SEQ ID NO: 269 - protein, 118 aa, synthetic construct
  REGION 1..118: note = Synthetic
QVQLVESGGGLVKPGGSLRLSCAASGFTYSDYYMSWIRQAPGKGLEWVSYISTSGSTIYYADSVKGRFTISRDNAKNSLYLQMNSLRAEDTAVYYCARDGFRGVLDYWGQGTLVTVSS

SEQ ID NO: 270 - protein, 110 aa, synthetic construct
  REGION 1..110: note = Synthetic
QSALTQPASVSGSPGQSITISCTGTSSDVGSYNLVSWYQQYPGKAPKLMIYEGSKRPSGVSNRFSGSKSGNTASLTISGLQAEDEADYYCCSYAGSSTYVFGTGTKVTVL

SEQ ID NO: 271 - protein, 122 aa, synthetic construct
  REGION 1..122: note = Synthetic
QVQLVESGGGVVQPGRSLRLSCAASGFTFSSYAMHWVRQAPGKGLEWVAVISYDGSNKYYADSVKGRFTISRDNSKNTLYLQMNSLRAEDTAVYYCARGYDILTGYLALDYWGQGTLVTVSS

SEQ ID NO: 272 - protein, 108 aa, synthetic construct
  REGION 1..108: note = Synthetic
EIVMTQSPATLSVSPGERATLSCRASQSVSSNLAWYQQKPGQAPRLLIYGASTRATGIPARFSGSGSGTEFTLTISSLQSEDFAVYYCQQYNNWPPYSFGQGTKLEIK

SEQ ID NO: 273 - protein, 123 aa, synthetic construct
  REGION 1..123: note = Synthetic
QVQLQESGPGLVKPSQTLSLTCTVSGGSISNGDYYWSWIRQPPGKGLEWIGYIYYSGSTYHNPSLKSRVTISLDTSKNQFSLKLSSVTAADTAVYYCARGFGSSWPYSWFDPWGQGTLVTVSS

SEQ ID NO: 274 - protein, 109 aa, synthetic construct
  REGION 1..109: note = Synthetic
SYELTQPPSVSVAPGQTARITCGGNNIGSKSVHWYQQKPGQAPVLVVNDDSDRPSGIPERFSGSNSGNTATLTISRVEAGDEADYYCQVWDSSSDHYVVFGGGTQLTVL

SEQ ID NO: 275 - protein, 123 aa, synthetic construct
  REGION 1..123: note = Synthetic
QVQLQESGPGLVKPSQTLSLTCTVSGGSISSGDYYWSWIRQPPGKGLEWIGYIYYSGSTYYNPSLKSRVTMSVDTSKNQFSLKLRSATAADTAVYYCARASLAAWDYGDFDHWGQGTLVTVSS

SEQ ID NO: 276 - protein, 107 aa, synthetic construct
  REGION 1..107: note = Synthetic
DIQMTQSPSSLSASVGDRVTITCRASQGIRNDLGWFQQIPGKAPKRLIYAASSLQSGVPSRFSGSGSGTEFTLTISSLQPEDFATYYCLQHNSYPLTFGGGTKVEIK

SEQ ID NO: 277 - protein, 122 aa, synthetic construct
  REGION 1..122: note = Synthetic
QVQLVQSGAEVKKPGASVKVSCKVSGYTLIELSMHWVRQAPGKGLEWMGGFDPEDVATIYARKFQGRVTMTEDTSTDTAYMELSSLRSEDTAVYYCATAFAVAGKRAAIAYWGQGTLVTVSS

SEQ ID NO: 278 - protein, 112 aa, synthetic construct
  REGION 1..112: note = Synthetic
DIVMTQSPLSLPVTPGEPASISCRSSQSLLHSNGYNYLDWYLQKPGQSPQLLIYLGSDRASGVPDRFSGSGSGTDFTLKISRVEAEDVGVYYCMQALQTPRTFGQGTKVEIK

SEQ ID NO: 279 - protein, 129 aa, synthetic construct
  REGION 1..129: note = Synthetic
QVQLVQSGAEVKKPGASVKVSCKASGYTFTSYDINWLRQATGQGLEWMGWMNPNSGNRGYAQKFQGRVTMTRNTSVSTAYMELSSLRSEDTAVYYCARTAPQVQLRSRIPSLNWYFDLWGRGTLVTVSS

SEQ ID NO: 280 - protein, 107 aa, synthetic construct
  REGION 1..107: note = Synthetic
DIQMTQSPSTLSASVGDRVTITCRASQSISSWLAWYQQKPGKAPKLLIYKASSLESGVPSRFSGSGSGTEFTLTISSLQPDDFATYYCQQYNSYPGTFGQGTKVEIK

SEQ ID NO: 281 - protein, 118 aa, synthetic construct
  REGION 1..118: note = Synthetic
EVQLLESGGGLVQPGGSLRLSCAASGFTFSSYAMSWVRQAPGRGLEWVSSITTSGGSTYYADSVKGRFTISRDNSKNTLYVQMNSLRAEDTAVYYCAKDLGSYYGGYWGQGTLVTVSS

SEQ ID NO: 282 - protein, 108 aa, synthetic construct
  REGION 1..108: note = Synthetic
DIQMTQSPSSLSASVGDRVTITCRASQGIRNDLGWYQQKPGKAPKRLIYAASSLQSGVPSRFSGSGSGTEFTLTISSLQPEDFATYYCLQYNSYPRVTFGPGTKVDIK

SEQ ID NO: 283 - protein, 129 aa, synthetic construct
  REGION 1..129: note = Synthetic
EVQLVESGGGLVKPGGSLRLSCAASGFTFSSYTMNWVRQAPGKGLEWVSSISSSSSFIYYADSVRGRITVSRDNAKNSLFLQMNSLRAEDTALYYCARTLRDGDYDFWRGYYPNAFDIWGQGTMVTVSS

SEQ ID NO: 284 - protein, 108 aa, synthetic construct
  REGION 1..108: note = Synthetic
EIVMTQSPATLSVSPGERATLSCRASQSVSSNLAWFQQKPGQAPRLLIYGASTRATGIPARFSGSGSGTEFTLTINSLQSEDFAVYYCQQYYNWPPWTFGQGTKVEIK

SEQ ID NO: 285 - protein, 120 aa, synthetic construct
  REGION 1..120: note = Synthetic
QVQLQESGSGLVKPSQTLSLTCAVSGGSISSGGYSWSWIRQPPGKGLEWIGSIYHSGSTYYNPSLKSRVTISVDRSKNQFSLKVSSVTAADTAVYYCARGPVGTTCFDYWGQGTLVTVSS

SEQ ID NO: 286 - protein, 110 aa, synthetic construct
  REGION 1..110: note = Synthetic
QTVVTQEPSFSVSPGGTVTLTCGLSSGSVSTSYFPSWYQQTPGQAPRTLIYNTNTRSSGVPDRFSGSILGNKAALTVTGAQADDESDYYCVLYMGDGIWVFGGGTKLTVL

SEQ ID NO: 287 - protein, 118 aa, synthetic construct
  REGION 1..118: note = Synthetic
QVQLQESGPGLVKPSETLSLTCTVSGGSISSYYWSWIRQPPGKGLEWIGYIYYSGSTNYNPSLKSRVTISVDTSKNQFSLKLSSVTAADTAVYYCARIVPRRWWFDPWGQGTLVTVSS

SEQ ID NO: 288 - protein, 112 aa, synthetic construct
  REGION 1..112: note = Synthetic
QSALTQPASVSGSPGQSITISCTGTSSDVGSYNLVSWYQQHPGKAPKLMIYEGSKRPSGVSNRFSGSKSGNTASLTISGLQAEDEADYYCCSYAGSSTLDVVFGGGTKLTVL

SEQ ID NO: 289 - protein, 118 aa, synthetic construct
  REGION 1..118: note = Synthetic
QVQLQESGPGLVKPSGTLSLTCAVSGGSISSSNWWSWVRQPPGKGLEWIGEIYHSGSTNYNPSLKSRVTISVDKSKNQFSLKLSSVTAADTAVYYCARGWGQLPLDYWGQGTLVTVSS

SEQ ID NO: 290 - protein, 110 aa, synthetic construct
  REGION 1..110: note = Synthetic
QSALTQPASVSGSPGQSIIISCIGTSSDVGSYNLVSWYQQHPGKAPKLMIYEGSKRPSGVSNRFSGSKSGNTASLTISGLQAEDEADYYCYSYAGSSTWVFGGGTKLTVL

SEQ ID NO: 291 - protein, 130 aa, synthetic construct
  REGION 1..130: note = Synthetic
QLQLQESGPGLVKPSETLSLTCTVSGGSISSSSYYWGWIRQPPGKGLEWIGSIYYSGSTYYNPSLKSRVTISVDTSKNQFSLKLSSVTAADTAVYYCARHGPPIWYYYDSSGYPDAFDIWGQGTMVTVSS

SEQ ID NO: 292 - protein, 113 aa, synthetic construct
  REGION 1..113: note = Synthetic
DIVMTQSPDSLAVSLGERATINCKSSQSVLYSSNNKNYLAWYQQKPGQPPKLLIYWASTRESGVPDRFSGSGSGTDFTLTISSLQAEDVAVYYCQQYYSTPYTFGQGTKLEIK

SEQ ID NO: 293 - protein, 121 aa, synthetic construct
  REGION 1..121: note = Synthetic
QVQLVQSGAEVKKPGASVKVSCKVSGYTLIELAIHWVRQAPGKGLEWMGGFDPEDVEIIYAQKFQGRATMTEDTSTDTAYMELRGLRSEDTAVYYCGTHYAVAGRRLVDYWGQGTLVTVSS

SEQ ID NO: 294 - protein, 109 aa, synthetic construct
  REGION 1..109: note = Synthetic
QFVLTQPPSVSAAPGQKVTISCSGSNSNIGNNYVSWYQQLPGTAPKLLIYENNKRPSGIPDRFSGSKSGTSATLGITGLQTGDEADYYCGTWDSSLNIGVFGGGTKLTV

SEQ ID NO: 295 - protein, 123 aa, synthetic construct
  REGION 1..123: note = Synthetic
QLQLQESGPGLVKPSETLSLTCTVSGGSISSRSYYWGWIRQPPGKRLEWVGSIFYTGSTFYNPSLESRLTISIDTPEKKISLRLTSVTAADTALYYCAFYEVGYSNDYGFDPWGQGTLVTVSS

SEQ ID NO: 296 - protein, 107 aa, synthetic construct
  REGION 1..107: note = Synthetic
DIQMTQSPSSLSASVGDRVTITCRASQDIRNDLGWYQQKPGKAPKRLIYGASSLQNGVPSRFSGSGSGTEFSLTISSLQPEDFTTYFCLQYNSYPLTFGGGTKVEIK

SEQ ID NO: 297 - protein, 128 aa, synthetic construct
  REGION 1..128: note = Synthetic
QVQLVQSGPEVKKPGASVKVSCKVSGYTLTELSIHWVRQAPGKGLEWMGGFDPEDAETIYAQKFQGRVTMTEDTSTDTAYMELSSLRSEDTAVYYCAAAFAVAGTKEDYSYYYGMDVWGQGTTVTVSS

SEQ ID NO: 298 - protein, 106 aa, synthetic construct
  REGION 1..106: note = Synthetic
DIQMTQSPSSLSASVGDRVTITCRASQGISNYLAWFQQKPGKAPKSLIYAASSLQSGVPSRFSGSGSGTDFTLTISSLQPEDFATYYCQQYNSYPRTFGQGTKVEI

SEQ ID NO: 299 - protein, 123 aa, synthetic construct
  REGION 1..123: note = Synthetic
QLQLQESGPGLVKTSETLSLTCTVSGGSISSTYYYWDWIRQPPGKGLEWIGSIHYAGTTYHNPSLNSRVTISVDTSKNQFSLKLSSVNAADTAVYYCATYIRGYSVDEGFDPWGQGTLVTVSS

SEQ ID NO: 300 - protein, 107 aa, synthetic construct
  REGION 1..107: note = Synthetic
DIQMTQSPSSLPASVGDRVTFTCRASQGINNDVGWYQQKPGKAPKRLIYAASSLQSGVPSRFSGSGSGREFILTISSLQPEDFATYYCLQYNSYPITFGGGTKVEIK

SEQ ID NO: 301 - protein, 119 aa, synthetic construct
  REGION 1..119: note = Synthetic
QVQLQQWGAGLLKPSETLSLTCAVDGGHFIGFYWSWIRLPPGKGLEWIGEIDHSGGTTYKPSLKSRVTMSVDKSKKEFYLKLTSVTAADTAVYYCARGVAVTGTHFDYWGQGTLVTVSS

SEQ ID NO: 302 - protein, 106 aa, synthetic construct
  REGION 1..106: note = Synthetic
DIQMTQSPSSVSASVGDRVTITCRASPAISRWLAWYQQKPGQAPKLLIYAASSLQSGVPSRFSGSGSGTDFTLTISSLQPEDFATYYCQQATYVPWTFGQGTKVEI

SEQ ID NO: 303 - protein, 128 aa, synthetic construct
  REGION 1..128: note = Synthetic
QVQLVQSGGEVKRPGASVKVSCKASGYTFTTYGISWVRQAPGQGLEWMGWISPYNSHTNYAQRLQDRVTMTTDTSTSTVYLELRNLRSDDTAVYYCARDLLTVLMAHTIPARSWFDSWGQGTLVTVSS

SEQ ID NO: 304 - protein, 107 aa, synthetic construct
  REGION 1..107: note = Synthetic
DIQMTQSPSTLSATVGDRVTITCRASQSISKWLAWYQQKPGKAPKVLIYKASSLESGVPSRFSGSGSGTEFTLTISSLQPDDAATYYCQQYKSNEDTFGQGTKLEIK

SEQ ID NO: 305 - protein, 130 aa, synthetic construct
  REGION 1..130: note = Synthetic
EVQLVESGGGLVKPGGSLRLSCVASTFTFSNYNMNWVRQTPGRGLEWVSSISSRSNYIYYVDSVKGRFTISRDNAKNSLYLQMNSLRAEDTAVYYCARGNHGPGSYYRLGDYYYYGMDVWGQGTTVTVSS

SEQ ID NO: 306 - protein, 108 aa, synthetic construct
  REGION 1..108: note = Synthetic
EIVMTQSPATLSVSPGERATLSCRASQSVSSNLAWYQQKPGQAPRLLIYETSTRATDIPARFSGSGSGTEFTLTISSLQSEDSAVYYCQQYHNWPPWTFGQGTKVEIK

SEQ ID NO: 307 - protein, 127 aa, synthetic construct
  REGION 1..127: note = Synthetic
QVQLVQSGAEVKKPGASVTVSCKVSLYSLSELSIHWVRQAPGKGLEWMGGFDPEAAKTIYARNFQGRVTMTEDSSADTAYMELSSLRSEDTAIYYCVTATAVSGTRTNYQYHYGLDVWGQGTTVTVS

SEQ ID NO: 308 - protein, 112 aa, synthetic construct
  REGION 1..112: note = Synthetic
DIVMTQTPLSSPVTLGQPASISCRSNQSLVHSDGDTYLSWLHQRPGQPPRVLIYKIFNRFSGVPDRFSGSGAGTDFTLKISRVEAEDVGVYYCMQATQFPFTFGPGTKVDIK

SEQ ID NO: 309 - protein, 127 aa, synthetic construct
  REGION 1..127: note = Synthetic
EVQLVESGGGLVKPGGSLRLSCAVSGFTFSNYNMNWVRQAPGKGLEWVSSISRSSSYIYLAESVKGRFTISRDNAKNSLYLQMNSLRAEDTAVYYCVRETSPHDLWKGYYGGYFDFWGQGTLVTVSS

SEQ ID NO: 310 - protein, 108 aa, synthetic construct
  REGION 1..108: note = Synthetic
EIVMTQSPATLSVSPGERATFSCRASQSVSSDLAWFQQKPGQAPRLLIYGASTRATGIPARFGGSGSGTEFTLTISSLQSEDFAVYYCQQYHNWPPRTFGQGTKVEIK

SEQ ID NO: 311 - protein, 127 aa, synthetic construct
  REGION 1..127: note = Synthetic
EVQLVESGGGLVKPGGSLRLSCAASGFTFSSYSMNWVRQAPGKGLEWVSSISGRSNFIYYTDSVKGRFTISRDNAKNSLYLQMNSLRAEDTAVYYCARVLKPHYDSSGYYEKISDYWGQGTLVTVSS

SEQ ID NO: 312 - protein, 108 aa, synthetic construct
  REGION 1..108: note = Synthetic
EIVMTQSPATLSVSPGERATLSCRASQSISSNLAWYQQKPGQAPRLLIYDVSTRATGFPARFSGSGSGTEFTLTISSLQSEDSAVYYCQQYHNWPPYTFGQGTKLEIK

SEQ ID NO: 313 - protein, 122 aa, synthetic construct
  REGION 1..122: note = Synthetic
QVQLQESGPGLVKPSQTLSLICAVSGGSISSNDYYWSWVRQPPGKGLEWMGNIFYSGITYYNPSLNSRLTMSVDTSKNQFYLKLSSVTAADTAIYFCARYVVNYSRDDGFDIWGQGTMVTVS

SEQ ID NO: 314 - protein, 107 aa, synthetic construct
  REGION 1..107: note = Synthetic
DIQMTQSPSSLSASVGDRVTFTCRASQDIRNDLGWYQQKPGKAPKRLIYGATSLQSGVPSRFSGSGSGTEFTLTISSLQPEDFATYFCLQYNTYPITFGQGTRLEIK

SEQ ID NO: 315 - protein, 130 aa, synthetic construct
  REGION 1..130: note = Synthetic
QVQLQESGPGLVKPSQTLSLTCTVSGGSIISGDYYWTWIRQPPGKGLEWIGYIFYSGTTHYNPSLKSRLTMSVDTSKKQFSLRLSSVTAADTAVYYCARETRYCSGASCSGGYHYGMDVWGQGITVTVSS

SEQ ID NO: 316 - protein, 108 aa, synthetic construct
  REGION 1..108: note = Synthetic
EIVMTQSPATLSVSPGERATLSCRASQSVSSNLAWYQQKPGQAPRLLIYGASTRATGIPARFSGSGSGTEFTLTISSLQSEDFAVYYCQQSNNWPPWTFGQGTKVEIK

SEQ ID NO: 317 - protein, 119 aa, synthetic construct
  REGION 1..119: note = Synthetic
QVQLQESGPGLVKPSGTLSLTCGVSGVSISTTNWWTWVRQPPGKGLEWIGEIYHSENTNYNPSLKSRVTMSVDKSKNQISLKLNSVTAADTAIYYCARRYYGSGSFDYWGQGTLVTVSS

SEQ ID NO: 318 - protein, 110 aa, synthetic construct
  REGION 1..110: note = Synthetic
QSALTQPASVSGSPGQSITISCTGTTSDVGSYNLVSWYQQHPGKAPKLLIYEGSKRPSGVSNRFSGSKSGNTASLTISGLQAEDEADYYCFSYAGFSTWVFGGGTKLTVL

SEQ ID NO: 319 - protein, 118 aa, synthetic construct
  REGION 1..118: note = Synthetic
QVQLQESGPGLVKPSGTLSLTCAVSGGSISSNNWWGWVRQPPEKGLEWIGDVYHSGNTNYNPSLKSRVTISLDKSKNQFSLKLTSVTAADTAVYYCARDRLVATGFDHWGQGALVTVS

SEQ ID NO: 320 - protein, 110 aa, synthetic construct
  REGION 1..110: note = Synthetic
QSALTQPASVSGSPGQSITISCTGTSSDVGSYNLVSWYQQHPGKAPKLMIYEAVKRPSGVSNRFSGSKSGNTATLTISGLQAEDEADYYCYSYAGSSTRVFGTGTKVTVL

SEQ ID NO: 321 - protein, 124 aa, synthetic construct
  REGION 1..124: note = Synthetic
QVQLVQSGAEVKKPGASVKVSCKASGYTFSSYGISWVRQAPGQGLEWMGWTSTYYDNKNYAQKFQDRLTMTTDTSTNTAYMELRSLRSDDAAVYYCARVAAAEIYYYYYCMDVWGQGTTVTVSS

SEQ ID NO: 322 - protein, 107 aa, synthetic construct
  REGION 1..107: note = Synthetic
DIQLTQSPSFLSTSVGDRVTITCRASQGINSHLAWYQQKPGKAPNLLIYDASTLQSGVPSRFNGSGSGTEFALTISSLQPEDFATYYCQQLNSYPITFGQGTRLEIK

SEQ ID NO: 323 - protein, 126 aa, synthetic construct
  REGION 1..126: note = Synthetic
EVQLVESGGGLVKPGGSLRLSCAASGLIFSDAWMSWVRQAPGKGLEWVGRIKSKTDGATTEYGAPVKGRFTISRDDSKNTLYLQMNSLKIEDTAVYYCTVDGLGATWYYYFAMDVWGQGTTVTVSS

SEQ ID NO: 324 - protein, 110 aa, synthetic construct
  REGION 1..110: note = Synthetic
QAVVTQEPSLTVSPGGTVTLTCASSTGAVTSGHYPYWFQQKPGQAPRTLIYDTNNKHSWTPARFSGSLLGGRAALTLSGAQPDDEADYYCLLSYSRARPVFGGGTKLTVL

SEQ ID NO: 325 - protein, 125 aa, synthetic construct
  REGION 1..125: note = Synthetic
QLQLQESGPGLVKPSETLSLTCTVSGGSIISGSYYWGWIRQPPGKGLEWIGSIFYSGSTYYNPSLKSRVTMSVDTSKNHFSLKLSSVTAADTAVYYCARLNSGEGYANLGVADSWGQGTLVTVSS

SEQ ID NO: 326 - protein, 107 aa, synthetic construct
  REGION 1..107: note = Synthetic
DIQMTQSPSSLSASVGDRVTITCRASQGIRNDLGWYQQKPGKAPKRLIYAASSLQSGVPSRFSGSGSGTEFTLTISSLQPEDFATYYCLQHNSYPLTFGGGTKVEIK

SEQ ID NO: 327 - protein, 124 aa, synthetic construct
  REGION 1..124: note = Synthetic
EVQLVESGGGLVQPGRSLRLSCAASGFNFDDYAIHWVRQAPGKGLEWVSVISYNSASKAYADFVKGRFTISRDNAKNSLYLQMNSLRVEDTALYYCVKDMTHRAIFGVGPFDRWGQGTLVTVSS

SEQ ID NO: 328 - protein, 107 aa, synthetic construct
  REGION 1..107: note = Synthetic
DIQLTQSPSFLSASVGDRVTITCRASQGISSNLAWSQQKPGKAPKLLIYAASTLQTGVSARFSGSGSGTEFTLTISSLQPEDFATYYCQQLNTYPLTFGGGTKVEIK

SEQ ID NO: 329 - protein, 123 aa, synthetic construct
  REGION 1..123: note = Synthetic
EVQLVESGGGLVQPGRSLRLSCAASGFSFENYAIHWVRQAPGKGLEWVSVISWNSGSVAYADSVKGRFTISRDNAKKTLYLQMNSLRPEDTAVYYCARDIDSMVTPGSRLDPWGQGTLVTVSS

SEQ ID NO: 330 - protein, 106 aa, synthetic construct
  REGION 1..106: note = Synthetic
SYELTQPPSVSVFPGQTATITCSGDKLGDEYTFWYQQKPGQSPVLVIYLDTKRPSGIPERFSGSNSGNTATLTISGTQAMDEADYYCQAWDSRVVVFGGGTKLTVL

SEQ ID NO: 331 - protein, 124 aa, synthetic construct
  REGION 1..124: note = Synthetic
QVQLQESGPGLVKPSQTLSLTCIVSGDSISGGDYYWSWIRQPPGKGLEWIGYIYHSGNTYYNLSLRSRVTISLDTSKNQFSLKLSSVAAADTAVYYCARGLTIFGVIGDYFDSWGPGTLVTVSS

SEQ ID NO: 332 - protein, 108 aa, synthetic construct
  REGION 1..108: note = Synthetic
EIVLTQSPATLSLCPGERATLSCRASQSFNTYLAWYQQKPGQVLSLLIYDASKRATGIPDRFSGSGSGTDFTLTISSLEPEDSAVYYCQQRTGWPPAITFGQGTRLEI

SEQ ID NO: 333 - protein, 123 aa, synthetic construct
  REGION 1..123: note = Synthetic
QVQLVESGGGVVQPGRSVRLSCAASGFTFSNYGMHWFRQAPGKGLEWVAVIWYDGSNEDYGDSVRGRFTISRDNTKRMLFLQMNSLRDDDTAVYYCARGTCVGTCDPQKFDYWGQGTLVTVSS

SEQ ID NO: 334 - protein, 106 aa, synthetic construct
  REGION 1..106: note = Synthetic
DIQMTQSPSSLSVSVGDRVTITCRASQDISDYLIWFQQKPGKAPKLLIYDASTLARGVPSRFSGGGSGTDFTFTINSLQPEDFATYYCQQYDNLPLTFGGGTKVEI

SEQ ID NO: 335 - protein, 123 aa, synthetic construct
  REGION 1..123: note = Synthetic
QVQLVESGGGVVQPGRSLRLSCAASGFTFSVYGIHWVRQAPGKGLEWLAIISYDGGNKYYADSVKGRFTISRDNSKNTVYLQMNSLRAEDTAVYFCAKVRYGYRYSYYGMDVWGQGTTVTVSS

SEQ ID NO: 336 - protein, 107 aa, synthetic construct
  REGION 1..107: note = Synthetic
DIQMTQSPSSLSASVGDRVTITCQASQDIKNYLNWYQQKPGKVPKLLIYDASNLEMGVPFRFSGSGSGTDFSFTIISLQPEDIATYYCQQYDNLPSSFGQGTKLEIK

SEQ ID NO: 337 - protein, 123 aa, synthetic construct
  REGION 1..123: note = Synthetic
QLQLQESGPGLVKPSETLSLTCTVSGGSISSSSYYWGWIRQPPGKGLEWIGNIHYSGSTYYNPSLKSRVTISVDTSKNQFSLKLSSVTAADTAVYYCAPYFSGYSYDEAFDIWGQGTMVTVSS

SEQ ID NO: 338 - protein, 107 aa, synthetic construct
  REGION 1..107: note = Synthetic
DIQMTQSPSSLSASVGDRVTITCRASQGIRNDLGWYQQKPGKAPKRLIYAASSLQSGVPSRFSGSGSGTEFTLTINSLQPEDFATYYCLQYNSYPLTFGGGTKVEIK

SEQ ID NO: 339 - protein, 121 aa, synthetic construct
  REGION 1..121: note = Synthetic
QVQLVESGGGVVQPGRSLRLSCAASGFTFSSYGMHWVRQAPGKGLEWVAVIWFDGSNKYYADSVKGRFTISRDYSKNTLYLQMNSLRAEDTAVYYCARNGGYSGYAHLNYWGQGTLVTVSS

SEQ ID NO: 340 - protein, 109 aa, synthetic construct
  REGION 1..109: note = Synthetic
EIVLTQSPGTLSLSPGERATLSCRASQSVPSSYLAWYQQKPGQAPRLLIYGASSRATGIPDRFSGSGSGTDFTLTISRLEPEDFAVYYCQQYGSSPTWTFGQGTKVEIK

SEQ ID NO: 341 - protein, 122 aa, synthetic construct
  REGION 1..122: note = Synthetic
QVQLVQSGAEVKKPGASVKVSCKASGYIFTSYGISWVRQAPGQGLEWMGWISTYNSNTNYAQKLQGRVTMTTDTSTSTAYMELRSLRSDDTAVYYCARDFGYSYGRDAFDIWGQGTMVTVSS

SEQ ID NO: 342 - protein, 111 aa, synthetic construct
  REGION 1..111: note = Synthetic
QSVLTQPPSVSGAPGQRVTISCTGSRLSIGAGYDVHWYQQLPGTAPKLLIYGNNYRPSGVPDRFSGSKSGTSASLAITGLQAEDEADYYCQSYDSSLSGWVFGGGTKLTVL

SEQ ID NO: 343 - protein, 127 aa, synthetic construct
  REGION 1..127: note = Synthetic
EVQLVESGGGLVKPGGSLRLSCAASGFTFSSYSMNWVRQAPGKGLEWVSSISSSRSYIYYADSVKGRFTISRDNAENSLYLQMNSLRAEDTAVYYCARVKAHYYDSSGYYPNYIDYWGQGTLVTVSS

SEQ ID NO: 344 - protein, 108 aa, synthetic construct
  REGION 1..108: note = Synthetic
EIVMTQSPATLSVSPGERATLSCRASQSVSSNLAWYQQKPGQAPRLLIYGASTRATGIPARFSGSGSGTEFTLTISSLQSEDFAVYYCQQYYNWPPWTFGQGTKVEIK

SEQ ID NO: 345 - protein, 128 aa, synthetic construct
  REGION 1..128: note = Synthetic
EVQLVESGGGLVKPGGSLRLSCAASGFTFSTYSMNWVRQAPGKGLEWVSSISSSSSFIYYADSVKGRFTISRDNAKNSLYLQMNSLRAEDTAVYYCARELPPVLRYFDWLSSWAFDIWGQGTMVTVSS

SEQ ID NO: 346 - protein, 110 aa, synthetic construct
  REGION 1..110: note = Synthetic
QSALTQPPSASGSPGQSVTISCTGTSSDVGGYNYVSWYQQHPGKAPKLMIYEVSKRPSGVPDRFSGSKSGNTASLTVSGLQAEDEADYYCSSYAGSNNYVFGTGTKVTVL

SEQ ID NO: 347 - protein, 124 aa, synthetic construct
  REGION 1..124: note = Synthetic
QVQLVESGGGVVQPGRSLRLSCAASGFTFTNYGMHWVRQAPGKGLEWVAVIWFDGSNKYYGDSVKGRFTISRDNSKNTLYLQMNSLRAEDTAVYYCARDRPGSSSWYEFGFDYWGQGTLVTVSS

SEQ ID NO: 348 - protein, 108 aa, synthetic construct
  REGION 1..108: note = Synthetic
SYELTQPPSVSVAPGQTATISCGGNNIGRKSVHWHQQKPGQAPVLVVYDDSDRPSGIPERFSGSNSGNTATLTISRVEAGDEADYYCQVWDSSSDHVVFGGGTKLTVL

SEQ ID NO: 349 - protein, 124 aa, synthetic construct
  REGION 1..124: note = Synthetic
EVQLLESGGGLVQPGGSLRLSCAASGLTFSSYAMSWVRQAPGKGLEWVSAISGSGGNTYYADSVKGRFTISRDNSKNTLYLQMNSLRAEDTAVYYCAQGERIAMMVVLTVIDHWGQGTLVTVSS

SEQ ID NO: 350 - protein, 110 aa, synthetic construct
  REGION 1..110: note = Synthetic
QSVLTQPPSVSAAPGQKVTISCSGSSSNIGNNYVSWYQQLPGTAPKLLIYDNNKRPSGIPDRFSGSKSGTSATLGITGLQTGDEADYYCGTWDSSLSAYVFGTGTKVTVL

SEQ ID NO: 351 - protein, 126 aa, synthetic construct
  REGION 1..126: note = Synthetic
EVQLVESGGGLVKPGGSLRLSCAASGFTFSDYNMNWVRQAPGKGLEWVSSISGRSSFIYFADSVKGRFTISRDNAKNSLYLQMISLRAEDTAVYYCARTSYSDFWSGYYPDAFDIWGQGTMVTVSS

SEQ ID NO: 352 - protein, 108 aa, synthetic construct
  REGION 1..108: note = Synthetic
EIVMTQSPATLSVSPGERATLSCRASQSVSSNLAWYQQKPGQAPRLLIYGASTRATGIPARFSGSGSGTEFSLTISSLQSEDFAVYYCQQYYNWPPWTFGQGTKVEIK

SEQ ID NO: 353 - protein, 126 aa, synthetic construct
  REGION 1..126: note = Synthetic
QVQLVESGGGVVQPGRSLRLSCAASGFTFSTYAMHWVRQAPGKGLDWVAFISYDGSDEYFADSVKGRFTISRDNSKNTLYLQMNSLRAEDTAVYYCARDSGIEGAKWVAAWYFDLWGRGTLVTVSS

SEQ ID NO: 354 - protein, 107 aa, synthetic construct
  REGION 1..107: note = Synthetic
DIQMTQSPSTLSASVGDRVTLTCRASQSISSWLAWYQQKLGNAPKLLIYKASTLESGVPSRFSGSGSGTDFTLTISSLQPDDFATYYCQQYNTYSGTFGQGTKVEIK

SEQ ID NO: 355 - protein, 122 aa, synthetic construct
  REGION 1..122: note = Synthetic
EVQLVESGGGLVKPGGSLRLSCAASGFTFSTYNVNWVRQAPGKGLEWVSCITSSGGYIYYADSVKGRFTISRDNAKNSLYLQMNSLRAEDTAVYYCARDGYNWNDRGYFDYWGQGTLVTVSS

SEQ ID NO: 356 - protein, 107 aa, synthetic construct
  REGION 1..107: note = Synthetic
DIQMTQSPSSLSASVGDRVTITCRASQGIRNDLGWYQQKPGKAPKLLIYGTSSLQSGVPSRFSGSGSGTDFTLTISSLQPEDFATYYCLQDYNYPRTFGQGTKVEIK

SEQ ID NO: 357 - protein, 126 aa, synthetic construct
  REGION 1..126: note = Synthetic
QVQLQESGPGLVKPSETLSLTCTVSGGSISSYYWSWIRQPPGKGLEWIAYIYYSGDTNYSTNYNPSLKSRVTISVDTSKNQISLKLSSVTAADTAVYYCARVVVPAAIIFTWFDPWGQGTLVTVSS

SEQ ID NO: 358 - protein, 107 aa, synthetic construct
  REGION 1..107: note = Synthetic
EIVMTQSPATLSVSPGERATLSCRASQSVRSNLAWYQQKPGQAPRLLIYGASTRATGIPARFSGSGSGTEFTLTISSLQSEDFAVYYCQQYNNWPQTFGQGTKVEIK

SEQ ID NO: 359 - protein, 120 aa, synthetic construct
  REGION 1..120: note = Synthetic
QVQLVQSGAEVKKPGASVKVSCKVSGYTLTELSMHWVRQAPGKGLEWMGGFDPEDGETIYAQKFQGRVTMTEDTSTDTAYMELSSLRSEDTAVYYCATSSIAVAGWFDPWGQGTLVTVSS

SEQ ID NO: 360 - protein, 110 aa, synthetic construct
  REGION 1..110: note = Synthetic
QSALTQPASVSGSPGQSITISCTGTSSDVGGYNYVSWYQQHPGKAPKLMIYEVSNRPSGVSNRFSGSKSGNTASLTISGLQAEDEADYYCSSYTSSSTRVFGTGTKVTVL

SEQ ID NO: 361 - protein, 125 aa, synthetic construct
  REGION 1..125: note = Synthetic
QVQLVESGGGLVKPGGSLRLSCAASGFTFSDYYMSWIRQAPGKGLEWVSYISSSGSIIYYADSVKGRFTISRDNAKNSLYLQMNSLRAEDTAVYYCAREPTTMVRGITVGYFDLWGRGTLVTVSS

SEQ ID NO: 362 - protein, 107 aa, synthetic construct
  REGION 1..107: note = Synthetic
EIVMTQSPATLSVSPGERATLSCRASQSVSSNLAWYQQKPGQAPRLLIYGASTRATGIPARFSGSESGTEFTLTISSLQSEDFAVYYCQQYNNWPRTFGQGTKVEIK

SEQ ID NO: 363 - protein, 127 aa, synthetic construct
  REGION 1..127: note = Synthetic
QVQLVQSGAEVKKPGASVKVSCKVSGYTLTELSIHWVRQAPGKGLEWMGSFDPEDGETICAQKFQGRVTMTEDTSTDTAYMELSSLRSEDTAVYYCATEWRGCSDTSCQGTNWFDPWGQGTLVTVSS

SEQ ID NO: 364 - protein, 111 aa, synthetic construct
  REGION 1..111: note = Synthetic
QPVLTQSPSASASLGASVKLTCTLSSGHSTYAIAWHQQQPEKGPRYLMKLNSDGSHNKGDGIPDRFSGSSSGAERYLTISSLQSEDEADYYCQTWGTGVRVFGGGTKLTVL

SEQ ID NO: 365 - protein, 123 aa, synthetic construct
  REGION 1..123: note = Synthetic
QLQLQESGPGLVKPSETLSLTCTVSGGSISGSSYFWGWIRQPPGKGLEWIGTIYYSGSTYYNPSLKSRVTISVDTSKNQFSLKLSSVTAADTAVYYCARYVRGYSLDDAFDIWGQGTMVTVSS

SEQ ID NO: 366 - protein, 107 aa, synthetic construct
  REGION 1..107: note = Synthetic
DIQMTQSPSSLSASVGDRVTITCRASQGIRNDLGWYQQKPGKAPKRLIYAASSLQSGVPSRFSGSGSGTEFTLTISSLQPEDFATYYCLQYNSYPLTFGGGTKVEIK

SEQ ID NO: 367 - protein, 122 aa, synthetic construct
  REGION 1..122: note = Synthetic
QVQLQESGPGLVKPSETLSLTCTVSGGSISSYYWSWIRQPPGKGLEWIGYIYYSGTSNYNPSIKSRVTISVDTSKNQFSLKLSSVTAADTAVYYCARSTIFGVTIPGCFDYWGQGTLVTVSS

SEQ ID NO: 368 - protein, 106 aa, synthetic construct
  REGION 1..106: note = Synthetic
SYELTQPPSVSVAPGQTARITCGGNNIGSKSVHWYQQKPGQAPVLVVYDDSDRPSGIPERFSGSNSGNTATLTISRVEAGDEADYYCQVWDSSSVVFGGGTKLTVL

SEQ ID NO: 369 - protein, 120 aa, synthetic construct
  REGION 1..120: note = Synthetic
QVQLQQWGAGLLKPSETLSLTCAVYGGSFSGYYWSWIRQPPGKGLEWIGEINHSGSTNYNPSLKSRVTISVDTSKNQFSLKLSSVTAADTAVYYCARWWGSGYYYVGDYWGQGTLVTVSS

SEQ ID NO: 370 - protein, 110 aa, synthetic construct
  REGION 1..110: note = Synthetic
QSALTQPASVSGSPGQSITISCTGTSSDVGSYNLVSWYQQHPGKAPKLMIYEGSKRPSGVSNRFSGSKSGNTASLTISGLQAEDEADYYCCSYAGSSTWVFGGGTKLTVL

SEQ ID NO: 371 - protein, 123 aa, synthetic construct
  REGION 1..123: note = Synthetic
QVQLVESGGGVVQPGRSLRLSCAASGFTFSSYSMHWVRQAPGKGLEWVALISYDGSNKYYADSVKGRFTISRDNSKNTLYLQMNSLRAEDTAVYFCASPRGSSAYYQHALDYWGQGTLVTVSS

SEQ ID NO: 372 - protein, 107 aa, synthetic construct
  REGION 1..107: note = Synthetic
DIQMTQSPSSLSASVGDRVTITCQASQDISNYLNWYQQKPGKAPKLLIYDAFNLETGVPSRFSGSGSGTDFTFTISSLQPEDVATYYCQHYDNLPNTFGQGTKLEIK

SEQ ID NO: 373 - protein, 133 aa, synthetic construct
  REGION 1..133: note = Synthetic
EVQLVESGGGLVKPGGSLRLSCAASGFTFSSYSMNWVRQAPGKGLEWVSSISSSSSYIYYVDSVKGRFTISRDNAKNSLSLQMNSLRAEDTAVYYCARGGYGSGSYYNVGFSDYFNVGFSDYWGQGTLVTVSS

SEQ ID NO: 374 - protein, 108 aa, synthetic construct
  REGION 1..108: note = Synthetic
EIVMTQSPATLSVSPGERATLSCRASQSISSNLAWYQQKPGQAPRLLIYGASTRATGIPARFSGSGSGTEFTLTISSLQSEDFAVYYCQQYYNWPPWTFGQGTKVEIK

SEQ ID NO: 375 - protein, 131 aa, synthetic construct
  REGION 1..131: note = Synthetic
QVQLVESGGGVVQPGRSLRLSCAASGFTFSSYAMHWVRQAPGKGLEWVAVISYDGSNKYYADSVKGRFTISRDNSKNTLYLQMNSLRAEDTAVYYCARDQQTLNPYSSRWYSVGEWYFDLWGRGTLVTVSS

SEQ ID NO: 376 - protein, 111 aa, synthetic construct
  REGION 1..111: note = Synthetic
QPVLTQSPSASASLGASVKLTCTLSSGHSSYAIAWHQQQPEKGPRYLMKLNSDGTHNKGDGIPDRFSGSSSGAERYLTISSLQSEDEADYYCQTWGTGIVLFGGGTKLTVL

SEQ ID NO: 377 - protein, 123 aa, synthetic construct
  REGION 1..123: note = Synthetic
QLQLQESGPGLVRPSETLSLTCTVSGGSIASSSYYWVWIRQTPGKGLEWIGSIFYSGTTYYNPSLKSRVTMSVDTSTNQFSLKLTSVTAADTAIYYCASYFYGYSYDEAFDNWGQGTMVTVSS

SEQ ID NO: 378 - protein, 106 aa, synthetic construct
  REGION 1..106: note = Synthetic
DIQMTQSPSSLSASVGDRVTVTCRASQDVRNDLGWYQQKPGKAPKRLIYAASSLQSGVPSRFSGSGSGTEFTLTISSLQPEDFATYYCLQYNSYPLTFGGGTKVEI

SEQ ID NO: 379 - protein, 121 aa, synthetic construct
  REGION 1..121: note = Synthetic
QVQLVESGGGVVQPGRSLRLSCAASGFTFTSYGIHWVRQAPGKGLEWVALMFFDGSNRHYADSVKGRFTISRDISKNTLFLEMNSLRAEDTAVYFCARDGGFTGYAHLAYWGQGTLVTVSS

SEQ ID NO: 380 - protein, 109 aa, synthetic construct
  REGION 1..109: note = Synthetic
EIVLTQSPGTLSLSPGERATLSCRASQSVSSSYLAWYQQKPGQAPRLLIYGASSRATGIPDRFSGSGSGTDFTLTISRLEPEDFAVYYCQQYGSSPTWTFGQGTKVEIK

SEQ ID NO: 381 - protein, 122 aa, synthetic construct
  REGION 1..122: note = Synthetic
QVQLVQSGAEVKKPGASVKVSCKASGYTFNTYGISWVRQAPGQGLEWMGWISAYKGDTNYAQKLQGRVTMTTDTSTSTAYMELRSLRSDDTAVYYCARDFGYSYGRDGFDIWGQGTMVTVSS

SEQ ID NO: 382 - protein, 111 aa, synthetic construct
  REGION 1..111: note = Synthetic
QSVLTQPPSVSGAPGQRVTISCTGSSSNIGAGYDVHWYQQFPGTAPKFLISGNSYRPSGVPDRFSGSKSGTSASLAITGLQAEDEADYYCQSYDRSLSGWVFGGGTKLTVL

SEQ ID NO: 383 - protein, 133 aa, synthetic construct
  REGION 1..133: note = Synthetic
EVQLVESGGGLVQPGRSLRLSCAASGFTFDDYAMHWVRQAPGKGLEWVSGISWTSDIIGYADSVKGRFTISRDNAKDSLHLQMNSLRLEDTAIYYCAKDVNTREAVAGFLSALDNYYYGMDVWGQGTTVTVSS

SEQ ID NO: 384 - protein, 112 aa, synthetic construct
  REGION 1..112: note = Synthetic
DIVMTQSPLSLPVTPGEPASISCRSSQSLLHRNGYKYLDWYLQKPGQSPQLLIYLGSNRASGVPDRFSGSGSGTDFTLKINRVEAEDVGIYYCMQALQTPWTFGQGTKVEIK

SEQ ID NO: 385 - protein, 128 aa, synthetic construct
  REGION 1..128: note = Synthetic
EVQLVESGGGLVKPGGSLRLSCAASGFSFTNYTMNWVRQAPGKELEWVSSISGSRLFIYYADSVKGRFTISRDNAKNSLFLQMNSLRVEDTAVYYCARELPPLLRYFDWLSSWAFDIWGQGTMVTVSS

SEQ ID NO: 386 - protein, 110 aa, synthetic construct
  REGION 1..110: note = Synthetic
QSALTQPPSASGSPGQSVTISCTGTSSDVGGYNYVSWYQQHPGKAPKLMIYEVTKRPSGVPDRFSGSKSGNTASLTVSGLQAEDESDYYCSSYAGTNNYVFGTGTKVTVL

SEQ ID NO: 387 - protein, 124 aa, synthetic construct
  REGION 1..124: note = Synthetic
QVQLVESGGGVVQPGRSLRLSCAASGFTFSNYGMHWVRQAPGKGLEWVAVTWFDGSNKYYGDSVKGRFTISRDNSKNTLYLQMNSLRAEDTAVYYCARDRPGSSSWYEFGFDYWGQGTLVTVSS

SEQ ID NO: 388 - protein, 108 aa, synthetic construct; identical to SEQ ID NO: 348
  REGION 1..108: note = Synthetic

SEQ ID NO: 389 - protein, 121 aa, synthetic construct
  REGION 1..121: note = Synthetic
QVQLVQSGAEVKKPGSSVKVSCKTSGGTFNSFAINWVRQAPGQGPEWMGRVIPVLEIANYAQKFQGRITITADKSTSTAYMELSSLTSEDTAIYYCARHHIAVAQPYFDYWGQGTLVTVSS

SEQ ID NO: 390 - protein, 110 aa, synthetic construct
  REGION 1..110: note = Synthetic
QSVLTQPPSASGTPGQRVTISCSGSSSNIGSNTVNWYQHLPGTAPKLLMSSDDQRPSGVPARFSGSKSGTSASLAISGLRSEDEADYYCASWDDRLNGVVFGGGTKLTVL

SEQ ID NO: 391 - protein, 124 aa, synthetic construct
  REGION 1..124: note = Synthetic
EVQLLESGGGLVQPGGSLRLACAASGFTFNNYAMSWVRQAPGKGLEWVSGISGGGGDTYYADSVRGRFSISRDNSKNRLLLQMNSLRAEDTAVYYCVKGERIIMLAVVTFLDYWGQGTLVTVSS

SEQ ID NO: 392 - protein, 110 aa, synthetic construct
  REGION 1..110: note = Synthetic
QSVLTQPPSVSAAPGQKVTVSCSGSSSNIGKNYVSWFQQLPGTAPKLLIYDNNKRPSGNPDRFSGSKSGTSATLGITGLQTGDEADYYCGTWDSSLSVYVFGTGTKVTVL

SEQ ID NO: 393 - protein, 126 aa, synthetic construct
  REGION 1..126: note = Synthetic
QVQLVQSGAEMKKPGASVRVSCKVSGYNLVEVSIHWVRQAPGKGLEWMGGFDAEDAKTIYAQKFQDRITMTEDTSTDTAYMELSSLRFEDTAVYYCATAPAFLERREYSYYGMNVWGQGTTVTVSS

SEQ ID NO: 394 - protein, 107 aa, synthetic construct
  REGION 1..107: note = Synthetic
DIQLTQSPSLLSASVGDRVTITCRASQGINNYLAWYQQKPGKAPKLLIYGASTLQSGVPSKFSGSGSGTEFTLTISSLQPEDFATYYCQQVSSFPRTFGPGTKVDIK

SEQ ID NO: 395 - protein, 126 aa, synthetic construct
  REGION 1..126: note = Synthetic
QVQLVESGGGVVQPGRSLRLSCAASGFTFTNFGMHWVRQAPGKGLQWVAVISYDGINKHFADSVKGRFTISRDNSKNTVYLQMNSLRPEDTAVYYCAKVSGARHYGDYGETSFDYWGQGTLVTVSS

SEQ ID NO: 396 - protein, 109 aa, synthetic construct
  REGION 1..109: note = Synthetic
EIVLTQSPGTLSLSPGESATLSCRASQSISNSYVAWYQQRPGQPPRLLIYGVSSRATDIPDRFSGSGSGTDFTLTISRLEPEDFAVYYCQQYGSSPPYTFGQGTKLEIK

SEQ ID NO: 397 - protein, 126 aa, synthetic construct
  REGION 1..126: note = Synthetic
QVQLVESGGGVVQPGRSLRLSCAASGFTFSSYGMHWVRQAPGKGLEWVAVISYDGSNKNYADSVKGRFTISRDNSKNTLYLQMNSLRAEDTAVYYCATDYYDRSHYYGLTSPFDYWGQGTLVTVSS

SEQ ID NO: 398 - protein, 113 aa, synthetic construct
  REGION 1..113: note = Synthetic
DIVMTQTPLSLPVTPGEPASISCRSSQSLLDSDDGNTYLDWFLQKPGQSPQLLIHTLSYRASGVPDRFSGSGSGTDFTLKISRVEAEDVGVYYCMQRIEFPITFGQGTRLEIK

SEQ ID NO: 399 - protein, 122 aa, synthetic construct
  REGION 1..122: note = Synthetic
QVQLVESGGGVVKPGRSLRLSCAASGLTFSSYGMHWVRQAPGKGLEWVAVLSSDGRTEHYADSVKGRFTISRDNSNNTLYLQMDSLRPEDTAVYYCANSDPTGYYWGLFDYWGQGTLVTVSS

SEQ ID NO: 400 - protein, 107 aa, synthetic construct
  REGION 1..107: note = Synthetic
DIQMTQSPSSLSASVGDRVTITCRASRGIRHDLDWYQQKPGKAPEHLIYAASRLQSGVPSRFSGSGSGTEFTLTISSLQPDDFATYYCLQHNSFPLTFGGGTKVEIK

SEQ ID NO: 401 - protein, 124 aa, synthetic construct
  REGION 1..124: note = Synthetic
QVQLQESGPGLVKPSQTLSLTCIVSGASISSGDYYWNWIRQPPGKGLEWIGYIYYSGSTHYNPSLSSRVTISIDTSKNQFSLKLNSVTAADTAVYYCARSKLSRTYYNFPFDSWGQGTLVTVSS

SEQ ID NO: 402 - protein, 113 aa, synthetic construct
  REGION 1..113: note = Synthetic
DIVMTQSPDSLAVSLGGRATINCKSSQSVLYSSNNKNYLAWYQQKPGQPPKLLIYWASTRESGVPDRFSGSGSGTDFTLTISSLQAADVAVYYCQQYYNIPRTFGQGTKVEIK

SEQ ID NO: 403 - protein, 122 aa, synthetic construct
  REGION 1..122: note = Synthetic
EVQLVESGGGLVKPGGSLRLSCAASGFTFSSYTMNWVRQAPGKGLEWVSSISSRSNFIYYVDSVRGRFTISRDNARNSLYLQMNSLRAEDTAVYYCAREYSSSWYNGPLDVWGQGTTVTVSS

SEQ ID NO: 404 - protein, 110 aa, synthetic construct
  REGION 1..110: note = Synthetic
EIVLTQSPGTLSLSPGERATLSCRASQSVSGDYLAWYQQKPGQTPRLLIYGASSRATGIPDRFSGSGSGTDFTLTISRLEAEDFAVYYCQQYGSSPPLWTFGHGTKVEIK

SEQ ID NO: 405 - protein, 126 aa, synthetic construct
  REGION 1..126: note = Synthetic
EVQLVESGGGLVQPGGSLRLSCVASGFTFDDYAMHWVRQVPGKGLEWVSGISWKGDSRGYGDSVKGRITISRDNAKKSLYLQMTSLRSEDTALYYCAKGGGDRRQTRFFLDVFDMWGPGTMVTVSS

SEQ ID NO: 406 - protein, 113 aa, synthetic construct
  REGION 1..113: note = Synthetic
DIVMTQSPDSLAVSLGERATINCKTSQRVLYSSDNKNYLAWYQQKPGQPPKLLIYWASTRESGVPDRFSGSGSGTDFTLTINSLQAEDVAVYYCQQYYLTPLTFGGGTKVEIK

SEQ ID NO: 407 - protein, 121 aa, synthetic construct
  REGION 1..121: note = Synthetic
QVQLQESGPGLVKPSETLSLTCTVSGGSMRGYYWSWIRQSPGKGLEWIGYVYYTGTTNYNSSLRSRVSISVDTSKNQFSLKVGSVTAADTAIYYCASVVDSTADPYYFHFWGQGTLVTVSS

SEQ ID NO: 408 - protein, 107 aa, synthetic construct
  REGION 1..107: note = Synthetic
SYELTQPLSVSVALGQTARITCGGHKIGNKYVHWYQQKPGQAPVLVIYRDTSRPSGIPERFSGSKSENTATLTISGAQVGDEADYYCQVWDSSAPVVFGGGTDLTVL

SEQ ID NO: 409 - protein, 120 aa, synthetic construct
  REGION 1..120: note = Synthetic
QVQLQESGPGLVKPSETLSLTCTVSGASISTYYWSWIRQPPGKGLEWIGYIYYSVSFNYNPSLKGRVTISADTSKNQFSLKLTSVTAADTAVYYCARDYGDGNFRSYFDYWGQGILVTVS

SEQ ID NO: 410 - protein, 107 aa, synthetic construct
  REGION 1..107: note = Synthetic
EIVMTQSPATLSVSPGERATLSCRASQSVSSNLAWYQQKPGQAPRLLIYGASTRATGIPARFSGSGSGTEFTLTISSLQSEDFAVYYCQQYNSWPRAFGLGTKVEIK

SEQ ID NO: 411 - protein, 122 aa, synthetic construct
  REGION 1..122: note = Synthetic
EVQLLESGGGLVQPGGSLRLSCAASGFTFSSYAMSWVRQAPGKGLEWVSLISGNGGSTYYADSVKGRFIASRDSSKNTLYLQMNSLRVEDTAVYYCAKGDTFMVPYNWFDPWGQGTLVTVSS

SEQ ID NO: 412 - protein, 105 aa, synthetic construct
  REGION 1..105: note = Synthetic
EIVLTQSPATLSLSPGERATLSCRASQSISTYLAWYQQKPGQAPRLLIYDVSNRATGIPARFSGSGSGTDFTLTISGLETEDFAVYYCQQRGDLPSFGGGTKVEI

SEQ ID NO: 413 - protein, 122 aa, synthetic construct
  REGION 1..122: note = Synthetic
EVQLLESGGGLVQPGGSLRLSCAASGFTFSSYAMNWVRQAPGKGLEWVSAIRSTGVSTYYADSVRGRFTISRDNSKNTLYLQMNSLRAEDTAVYYCAKGDTAMAKYNWFDPWGQGTLVTVSS

SEQ ID NO: 414 - protein, 126 aa, synthetic construct
  REGION 1..126: note = Synthetic
QVQLQESGPGLVKPSETLSLTCSVSGGSVSNGTSYWSWIRQPPGKRLEWIGYIYYRGSTNYITNYSSSLKGRVTISVDTSRNQFSLRLSSMTAADTAVYYCARVLCGSTSCYYFDYWGQGALVTVS

SEQ ID NO: 415 - protein, 120 aa, synthetic construct
  REGION 1..120: note = Synthetic
QVQLVESGGGVVQPGRSLRLSCAASGFTFSSYAMHWVRQAPGKGLEWVAVISYDGSNKYYADSVKGRFAISRDNSRNTSFLQMNSLRAEDTALYYCARDRLAGSNYFDYWGHGTLVSVSS

SEQ ID NO: 416 - protein, 109 aa, synthetic construct
  REGION 1..109: note = Synthetic
EIVLTQSPVTLSLSPGQRATLSCRASQSVGRFLAWYQQRPGQAPRLLIYDTSNRATGIPARFSGSGSETDFTLTISSLEPEDFAVYYCQQRGTWPPAITFGPGTKVDIK

SEQ ID NO: 417 - protein, 120 aa, synthetic construct
  REGION 1..120: note = Synthetic
QVQLVESGGGVVQPGRSLRLSCEASGFTFSSHGIHWVRQAPGKGLEWLAVIWYDGNNKFYADSVKGRFTISRDNSRNTLFLQMNSLRAEDTALYYCARDRLAGSNYFDFWGHGTLVTVSS

SEQ ID NO: 418 - protein, 108 aa, synthetic construct
  REGION 1..108: note = Synthetic
EIVLTQSPVTLSLSPGQRATLSCRASQSVGRFLAWYQQKPGQAPRLLIYDTSNRATGVPDRFSGSGSETDFTLTIYSLEPDDSAVYYCQQRGTWPPAITFGPGTKVDI

SEQ ID NO: 419 - protein, 120 aa, synthetic construct; identical to SEQ ID NO: 417
  REGION 1..120: note = Synthetic

SEQ ID NO: 420 - protein, 108 aa, synthetic construct; identical to SEQ ID NO: 418
  REGION 1..108: note = Synthetic

SEQ ID NO: 421 - protein, 122 aa, synthetic construct
  REGION 1..122: note = Synthetic
QVQLVQSGAEVKKPGASVKVSCKVSGYTLIELSMHWVRQAPGKGLEWMGGFDPEDGETIYAQKFQGRVTMTEDTSTDTAYMELSSLRSEDTAVYYCATAGPLPYYYYCMDVWGQGTTVTVSS

SEQ ID NO: 422 - protein, 109 aa, synthetic construct
  REGION 1..109: note = Synthetic
EIVLTQSPGTLSLSPGERATLSCRASQSVSSRYLAWYQQKPGQAPRLLIYGASSRATGIPDRFSGSGSGTDFTLTISRLEPEDFAVYYCQQYGSSPMYTFGQGTKLEIK

SEQ ID NO: 423 - protein, 128 aa, synthetic construct
  REGION 1..128: note = Synthetic
EVQLVQSGAEVKKPGESLKISCKGSGYSFTSHWIGWVRQMPGKGLEWMGIIYPGDSDTRYSPSFQGQVTISADKSISTAYLQWSSLKASDTAMYYCARPDCVNCCSGGSCYFDAFDIWGQGTMVTVSS

SEQ ID NO: 424 - protein, 113 aa, synthetic construct
  REGION 1..113: note = Synthetic
DIVMTQTPLSLPVTPGEPASISCRSSQSLLDSDDGNTYLDWYLQKPGQSPQLLIYTLSYRASGVPDRFSGSGSGTDFTLKISRVEAEDVGVYYCMQRIEFPWTFGQGTKVEIK

SEQ ID NO: 425 - protein, 123 aa, synthetic construct
  REGION 1..123: note = Synthetic
QLQLQESGPGLVKPSETLSLTCTVSGGSISSSTYYWGWIRQPPGKGLEWIGNIFYSGSTYYNPSLKSRVTISVDTSKNHFSLRLSSVTAADTAVYYCARHGDTYYYESTLDYWGQGTLVTVSS

SEQ ID NO: 426 - protein, 107 aa, synthetic construct; identical to SEQ ID NO: 326
  REGION 1..107: note = Synthetic

SEQ ID NO: 427 - protein, 122 aa, synthetic construct
  REGION 1..122: note = Synthetic
QVQLVQSGAEVKKPGASVKVSCKASGYTFTSYGISWVRQAPGQGLEWMGWISGYDGNTNYAQKVQGRVTMTTDTSTSTAYMELRSLRSDDTAVYYCARDHRTVTTFGTFDYWGQGTLVTVSS

SEQ ID NO: 428 - protein, 107 aa, synthetic construct
  REGION 1..107: note = Synthetic
DIQMTQSPSSLSASVGDRVTITCRASQSIGYYLNWYQQKPGKAPKLLIYAAASLQSGVPSRFSGSGSGTDFTLTISSLQPEDFATYYCQQSYSTPFTFGPGTKVDIK

SEQ ID NO: 429 - protein, 121 aa, synthetic construct
  REGION 1..121: note = Synthetic
QVQLQQWGAGLLKPSETLSLTCAVYGGSFSGYYWSWIRQPPGKGLEWIGEIIHSGSTNYNPSLKSRLTISLDTSKNQFSLRLSSVTAADTAVYYCARGHPMIVVVKGFDPWGQGTLVTVSS

SEQ ID NO: 430 - protein, 107 aa, synthetic construct
  REGION 1..107: note = Synthetic
DIQMTQSPSSLSASVGDRVTITCRASQGIRNDLGWYQQKPGKAPKRLIYAASSLQSGVPSRFSGSGSGTEFTLTISSLQPEDFATYYCLQHNSYPRTFGQGTKLEIK

SEQ ID NO: 431 - protein, 124 aa, synthetic construct
  REGION 1..124: note = Synthetic
EVQLVESGGGLVQPGGSLRLSCAASGFTFSSYWMSWVRQAPGKGLEWVANMKQDGSEKYYVDSVKGRFTISRDNAKNSLYLQMNSLRAEDTAVYYCARGARFLEWLPQSPFDYWGQGTLVTVSS

SEQ ID NO: 432 - protein, 106 aa, synthetic construct
  REGION 1..106: note = Synthetic
DIQMTQSPSSLSASLGDRVTITCRASQGISNSLAWYQQKPGKAPKLLLYAASRLGSGVPSRFSGSGSGTDYTLTISSLQPGDFAAYYCQQYYSTPLTFGGGTKVEI

SEQ ID NO: 433 - protein, 128 aa, synthetic construct
  REGION 1..128: note = Synthetic
QVQLVQSGAEVKKPGASVKVSCKVSGYTLIELSMHWVRQAPGKGLEWMGGFDPEVGETLYAPKFQGRVTMTEDTSTDTAYMELSSLSSEDTALYYCATAVAVAGTPTNYYYYYGIDVWGQGTTVTVSS

SEQ ID NO: 434 - protein, 110 aa, synthetic construct
  REGION 1..110: note = Synthetic
QSVLTQPPSASGTPGQRVTISCSGSRSNIGSNYVYWYQQLPGTAPKLLIYRNNQRPSGVPDRFSGSKSGTSASLAIGGLRSEDEADYYCAARDDSLSGWVFGGGTKLTVL

SEQ ID NO: 435 - protein, 128 aa, synthetic construct
  REGION 1..128: note = Synthetic
QVQLVQSGAEVKKPGASVKVSCKVSGYTLTELSMHWVRQAPGKGLEWMGGFDPEDGETIYAQKFQGRVTMTEDTSTDTAYMELSSLRSEDTAVYYCATGYAVTGTPQNYSYYYGMDVWGQGTTVTVSS

SEQ ID NO: 436 - protein, 107 aa, synthetic construct
  REGION 1..107: note = Synthetic
EIVLTQSPGTLSLSPGERATLSCRASQSVSSSCLAWYQQKPGQAPRLLIYGASGRATGIPDRFSGSGSGTDFTLTISRLEPEDFAVYYCQQYGSSHSFGQGTKLEIK

SEQ ID NO: 437 - protein, 128 aa, synthetic construct
  REGION 1..128: note = Synthetic
EVQLVESGGGLVKPGGSLRLSCAASGFTFSSYTMNWVRQAPGMGLEWVSSISSSSSYIYYVDSVKGRFTISRDNAKNSLYLQMNSLRAEDTAVYYCARDSARWFHDSSGYYPSDFDYWGQGTLVTVSS

SEQ ID NO: 438 - protein, 108 aa, synthetic construct
  REGION 1..108: note = Synthetic
EIVMTQSPATLSVSPGERATLSCRASQSVSSNLAWYQQKPGQAPRLLIYGASTRATGIPARFSGSGSGTEFTLTISSLQSEDFAVYYCQHYYNWPPWTFGQGTKVEIK

SEQ ID NO: 439 - protein, 129 aa, synthetic construct
  REGION 1..129: note = Synthetic
QVQLVQSGAEVKKPGASVKVSCKAAGYTFTSYGISWVRQAPGQGLEWMGWISAYNGNTKYAQKLQGRVTMTTETSTSTVYMELRSLRSDDTAVYYCARDGEMGGSYRYVDYYYYGMDVWGQGTTVTVSS

SEQ ID NO: 440 - protein, 106 aa, synthetic construct
  REGION 1..106: note = Synthetic
SYELTQPPSVSVSPGQTASITCSGDKLGDKYACWYQQKPGQSPVLVIYQDSKRPSGIPERFSGSNSGNTATLTISGTQAMDEADYYCQAWDSSTAVFGGGTKLTVL

SEQ ID NO: 441 - protein, 129 aa, synthetic construct
  REGION 1..129: note = Synthetic
EVQLLESGGGLVQPGGSLRLSCAASGFTFSSYAMSWVRQAPGKGLEWVSGISGSGGSTYYADSVKGRFIISRDNSKNTVYLQMNSLRVEDTAVYYCAKCIRYYYGSGSYYKPTGWFDPWGQGTLVTVSS

SEQ ID NO: 442 - protein, 107 aa, synthetic construct
  REGION 1..107: note = Synthetic
DIQMTQSPSSLSASVGDRVTITCQASQDISNYLNWYHQKPGKAPKLLIYDASNLETGVPSRFSGSGSGTDFTFTISSLQPEDIATYYCQQYDNLPLTFGGGTKVEIK

SEQ ID NO: 443 - protein, 126 aa, synthetic construct
  REGION 1..126: note = Synthetic
EVQLVESGGGLVQPGGSLRLSCVASGLTPSTYWMHWVRQAPGKGLVWVSRISSDGSTTNYADSVKGRFTMSRDNAKNTLYLQMNSLRAEDTAVYYCAKGPGGSGVYYFYFYYMDAWGKGTTVTVSS

SEQ ID NO: 444 - protein, 107 aa, synthetic construct
  REGION 1..107: note = Synthetic
EIVLTQSPGTLSLSPGERATLSCRASQSVSSNYLTWYQQKPGQAPRLLIYGASSRATGIPDRFSGSGSGTDFTLTINRLEPEDFAVYYCQQYGSLYTFGQGTKLEIK

SEQ ID NO: 445 - protein, 120 aa, synthetic construct
  REGION 1..120: note = Synthetic
QVQLQESGPGLVKPSGTLSLTCAVSGGSISSSNWWSWVRQPPGKGLEWIGEIYHSGSTNYNPSLKNRVTISVDKSKNQFSLNLSSVTAADTAVYYCARDQGATRRELAYWGQGTLVTVSS

SEQ ID NO: 446 - protein, 110 aa, synthetic construct
  REGION 1..110: note = Synthetic
QSALTQPASVSGSPGQSITISCTGTSSDVGSYNLVSWFQQHPGKAPKLMIYQVSKRPSGVSNRFSGSKSGNTASLTISGLQAEDEADYYCYSYAGSSTWVFGGGTKLTVL

SEQ ID NO: 447 - protein, 127 aa, synthetic construct
  REGION 1..127: note = Synthetic
EVQLLESGGGLVQPGGSLRLSCAASGFTFSSYAMSWVRQAPGKGLEWVSAISGSGGSTYYADSVKGRFTISRDNSKNTLYLQMNSLRAEDTAVYYCAKGVRLVPGDFWDNYWYFDLWGRGTLVTVSS

SEQ ID NO: 448 - protein, 110 aa, synthetic construct
  REGION 1..110: note = Synthetic
QSALTQPPSASGSPGQSVTISCTGTSSDVGGYNYVSWYQQHPGKAPKLMIYEVSKRPSGVPDRFSGSKSGNTASLTVSGLQAEDEADYYCSSYAGSNNLVFGGGTKLTVL

SEQ ID NO: 449 - protein, 121 aa, synthetic construct
  REGION 1..121: note = Synthetic
QVQLVQSGAEVKKPGASVKVSCKVSGFTLTELSIHWVRQAPGKGLEWMGGFDPEDAETIYAQRFQGRVTMTEDTSTDTAYMELSRLRSEDTAVYYCATGSPLVPESWFDPWGQGTLVTVSS

SEQ ID NO: 450 - protein, 106 aa, synthetic construct
  REGION 1..106: note = Synthetic
SYELTQPPSVSVSPGQTASITCSGDKLGDKYACWYQQKPGQTPVLVIYQDSKRPSGIPERFSGSNSGNTATLTISGTQAMDEADYYCQAWDSSTVVFGGGTKLTVL

SEQ ID NO: 451 - protein, 125 aa, synthetic construct
  REGION 1..125: note = Synthetic
QVQLVQSGAEVKKPGASVKVSCKVSGYTLIELSMHWVRQAPGKGLEWMGGFDPEDGETIYAQKFQGRVTMTEDTSTDTAYMELNSLRSEDTAVYYCATAPPYCSGGSCSNWLDPWGQGTLVTVSS

SEQ ID NO: 452 - protein, 109 aa, synthetic construct
  REGION 1..109: note = Synthetic
SYELTQPPSVSVAPGQTARITCGGNNIGSKSVHWYQQKPGQAPVLVVYDDSDRPSGIPERFSGSNSGNTATLTISRVEAGDEADYYCQVWDSSPDHPVVFGGGTKLTVL

SEQ ID NO: 453 - protein, 125 aa, synthetic construct
  REGION 1..125: note = Synthetic
EVQLVQSGAEVKKPGESLRISCKGSGYSFTHYWISWVRQMPGKGLEWMGRIDPSDSYTNYSPSFQGHVTISADKSITTAYLQWSSLKASDTAIYYCAREPRITIFGVMENWFDPWGQGTLVTVSS

SEQ ID NO: 454 - protein, 110 aa, synthetic construct
  REGION 1..110: note = Synthetic
QSVLTQPPSASGTPGQRVTISCSGSSSNIGSNYVYWYQQLPGTAPKLLIYSNNQRPSGVPDRFSGSKSGTSASLAISGLRSEDEADYYCAACDDSLSGWVFGGGTKLTVL

SEQ ID NO: 455 - protein, 129 aa, synthetic construct
  REGION 1..129: note = Synthetic
QVQLQESGPGLVKPSQTLSLTCTVSGGSISSGSYYWSWIRQPAGKGLEWIGRIYITGSTNYNPSLKSRVTISVDTSKNQFSLKLSSVTAADTAVYYCARDPHRLYYYDSSGYANAFDIWGQGTMVTVSS

SEQ ID NO: 456 - protein, 110 aa, synthetic construct
  REGION 1..110: note = Synthetic
QSALTQPASVSGSPGQSITISCTGTSSDVGSYNLVSWYQQHPGKAPKFLIYEVNKRPSGVSNRFSGSKSGNTASLTISGLQAEDEADYYCCSYAGSIIWVFGGGTKLTVL

SEQ ID NO: 457 - protein, 124 aa, synthetic construct
  REGION 1..124: note = Synthetic
QVQLVQSGAEVKKPGSSVKVSCKASGGTFSSYTFSWVRQAPGQGLEWMGRIIPILGIADYAQKFQGRVTITADKSTSTAYMELSSLRSEDTAVYYCARMNSGTLVNGELTSDYWGQGTLVTVSS

SEQ ID NO: 458 - protein, 107 aa, synthetic construct
  REGION 1..107: note = Synthetic
DIQMTQSPSSLSASVGDRVTITCRASQSISSYLNWYQQKPGKVPKLLIYAASSLQSGVPSRFSGSGSGTDFTLTISSLQPEDFATYYCQQSYITPITFGQGTRLEIK

SEQ ID NO: 459 - protein, 124 aa, synthetic construct
  REGION 1..124: note = Synthetic
QVQLVQSGAEVKKPGASVKVSCKASGYTFSSYGISWVRQAPGQGLEWMGWTSTYNGNTNYAQKLQGRVTMTTDTSTNTAYMELRSLRSDDTAVYYCARVPSDAYYNDRTDFDYWGQGTLVTVSS

SEQ ID NO: 460 - protein, 106 aa, synthetic construct
  REGION 1..106: note = Synthetic
SYELTQPPSVSVSPGQTASITCSGDKLEDKYACWYQQKPGQSPVLVIYQDSKRPSGIPERFSGSNSGNTATLTISVTQAMDEADYYCQAWDSSTAVFGGGTKLTVL

SEQ ID NO: 461 - protein, 128 aa, synthetic construct
  REGION 1..128: note = Synthetic
QVQLVQSGAEVKKPGASVKVSCKVSGYTLTELSVHWVRQVPGKGLEWMGGFDPEDGETIYAQKFQGRVTMTEDTSTDTAYMELSSLRSEDTAVYYCATGTAVAGTPQAYYYYYGMDVWGQGTTVTVSS

SEQ ID NO: 462 - protein, 107 aa, synthetic construct
  REGION 1..107: note = Synthetic
DIQMTQSPSSLSASVGDRVTISCRASQGISNSLAWYQQKPGKAPKLLLYAASRLESGVPSRFSGSGSGTDYTLTISSLQPEDFATYYCQQYYSTPVTFGQGTKLEIK

SEQ ID NO: 463 - protein, 124 aa, synthetic construct
  REGION 1..124: note = Synthetic
QVQLVESGGGVVQPGRSLRLSCAASGFTFSNYGMHWVRQAPGKGLEWVAVIWYDGSNKYYAGSVKGRFTISRDNSKNTLYLQMNSLRAEDAAVYYCARPSGIAAAGGGYYFDYWGQGTLVTVSS

SEQ ID NO: 464 - protein, 110 aa, synthetic construct
  REGION 1..110: note = Synthetic
QSALTQPASVSGSPGQSITISCTGTSSDVGTYNYVSWYQQHPGKAPKLMIYEVSNRPSGVSNRFSGSKSGNTASLTISGLQAEDEADYYCSSYTSSSTRVFGGGTKLTVL

SEQ ID NO: 465 - protein, 121 aa, synthetic construct
  REGION 1..121: note = Synthetic
EVQLLESGGGLVQPGGSLRLSCAASRFTFSSYAMNWVRQAPGKGLEWVSTISGSGGSTYFADSVKGRFTISRDNSKNTLYLHMNSLRAEDTAVYYCAKGRWTLTLGVMDVWGQGTTVTVSS

SEQ ID NO: 466 - protein, 111 aa, synthetic construct
  REGION 1..111: note = Synthetic
QSALTQPASVSGSPGQSITISCTGTSSDVGGYNFVSWYQQHPGKAPKLMIYEVSNRPSGVSNRFSGSKSGNTASLTISGLQAEDEADYYCSSYTSSSTPYVFGTGTKVTVL

SEQ ID NO: 467 - protein, 117 aa, synthetic construct
  REGION 1..117: note = Synthetic
QVQLQESGPGLVKPSGTLSLTCAVSGGSISSSNWWSWVRQPPGKGLEWIGEIYHSGSTNYNPSLKSRVTISVDKSKNQFSLKVSSVTAADTAVYYCATVPAGTIYYWGQGTLVTVSS

SEQ ID NO: 468 - protein, 110 aa, synthetic construct
  REGION 1..110: note = Synthetic
QSALTQPASVSGSPGQSITISCTGTSSDVGSYNLVSWYQHHPGKAPKLMIYEVNKRPSGVSIRFSGSKSGNTASLTISGLQAEDEADYYCCSYAGFSTYVFGGGTKLTVL

SEQ ID NO: 469 - protein, 117 aa, synthetic construct
  REGION 1..117: note = Synthetic
QVQLVESGGGVVQPGRSLRLSCAASGFTFSSYAMHWVRQAPGKGLEWVALISYDGSNKYYADSVKGRFTISRDNSKTTLYLQMNSLRAEDTAVYYCARPAGADMDVWGKGTTVTVSS

SEQ ID NO: 470 - protein, 106 aa, synthetic construct
  REGION 1..106: note = Synthetic
SYELTQAPSVSVSPGQTASITCSGDKLGDKYAGWYQQRPGQSPVLVIYQDSKRPSGIPERFSGSNSGNTATLTISGTQAMDEADYYCQAWDSSTVVFGGGTKLTVL

SEQ ID NO: 471 - protein, 124 aa, synthetic construct
  REGION 1..124: note = Synthetic
EVQLLESGGGLVQPGGSLRLSCAASGFTFSSYAMSWVRQAPGKGLEWVSGISGSGGSTYYADSVKGRFTISRDNSKNTLYLQMNSLRAEDTAVYYCAKDQDGIVGAPGNVFDYWGQGTLVTVSS

SEQ ID NO: 472 - protein, 106 aa, synthetic construct
  REGION 1..106: note = Synthetic
SYELTQPPSVSVSPGQTASITCSGDTLGDKYTCWYQQKPGQSPVLVIYQDSKRPSGIPERFSGSNSGNTATLTISGTQAMDEADYYCQAWDSRNAVFGGGTKLTVL

SEQ ID NO: 473 - protein, 124 aa, synthetic construct
  REGION 1..124: note = Synthetic
EVQLLESGGGLVQPGGSLRLSCAASGFTFSSYAMSWVRQAPGKGLEWVSTISGSGGSIYYADSVKGRFTISRDNSKNTLYLQMNSLRAEDTAVYYCAKDAAAARFHYYFYMDVWGKGTTVTVSS

SEQ ID NO: 474 - protein, 112 aa, synthetic construct
  REGION 1..112: note = Synthetic
QSALTQPASVSGSPGQSITISCTGTSSDVGSYNLVSWYQHHPGKAPKLMIYEGSKRPSGVSYRFSGSKSGNTASLTISGLQAEDEADYYCCSYAGSSTSYVIFGGGTKLTVL

SEQ ID NO: 475 - protein, 117 aa, synthetic construct
  REGION 1..117: note = Synthetic
EVQLLESGGGLVQPGGSLRLSCAASGFTFSSYAMSWVRQAPGKGLEWVSGISASGSSTYHADSVKGRFTISRDNSKNTLYMQMNSLRAEDTAVYYCAKDRGGYLQHWGQGTLVTVSS

SEQ ID NO: 476 - protein, 106 aa, synthetic construct
  REGION 1..106: note = Synthetic
SYELTQPPSVSVSPGQTASITCSGDKLGDKYACWYQQKPGQSPVLVIYQDTKRPSGIPERFSGSNSGNTATLTISGTQAMDEADYYCQAWDSSTYVFGTGTKVTVL

SEQ ID NO: 477 - protein, 117 aa, synthetic construct
  REGION 1..117: note = Synthetic
EVQLLESGGGLVQPGGSLRLSCAASGFTFSTYAMSWVRQAPGKGLEWVSAISSSGYSTYYADSVKGRFTISRDNSKNTLYLQMNSLRAEDTAVYYCAKDSGAGYDYWGQGTLVTVSS

SEQ ID NO: 478 - protein, 106 aa, synthetic construct
  REGION 1..106: note = Synthetic
SYELTQPPSVSVSPGQTASITCSGDKLGDKYACWYQQKPGQSPVLVIYQDSKRPSGIPERFSGSNSGNTATLTISGTQAMDEADYYCQAWDSSTVVFGGGTKLTVL

SEQ ID NO: 479 - protein, 117 aa, synthetic construct
  REGION 1..117: note = Synthetic
EVQLLESGGGLVQPGGSLRLSCAASGFTFSSYAMSWVRQAPGKGLEWVSAISGSGGRTYYADSVKGRFTISRDNSKNTLYLLMNSLRAEDTAVYYCAKDQGSGYSDWGQGTLVTVSS

SEQ ID NO: 480 - protein, 106 aa, synthetic construct
  REGION 1..106: note = Synthetic
SYELTQPPSVSVSPGQTARITCSGDKLGDKYVCWYQQKPGQSPVLVIYQDSKRPSGIPERFSGSNSGNTATLTISGTQAMDEADYYCQAWDSSTVVFGRGTKLTVL

SEQ ID NO: 481 - protein, 117 aa, synthetic construct
  REGION 1..117: note = Synthetic
QVQLVESGGGVVQPGRSLRLSCAASGFTFSSYAMHWVRQAPGKGLEWVALISYDGSNKYYADSVKGRFTISRDNSKNTLYLQMNSLRAEDTAFYFCARDGGGYFDYWGQGTLVTVSS

SEQ ID NO: 482 - protein, 106 aa, synthetic construct
  REGION 1..106: note = Synthetic
SYELTQPPSVSVSPGQTASITCSGDKLGDKYACWYQQKPGQSPVLVIYQDSKRPSGIPERFSGSNSGNTATLTISGTQAMDEADYHCQAWDSSTVVFGGGTKLTVL

SEQ ID NO: 483 - protein, 127 aa, synthetic construct
  REGION 1..127: note = Synthetic
EVQLLESGGGLVQPGGSLRLSCAASGFTFSSLSWVRQAPGKGLEWVSGISGSGGSTYYADSVKGRFTISRDNSKNTLYLQMNSLRAEDTAVYYCAKAQRITIFGVVGPGRGHGMDVWGQGTTVTVSS

SEQ ID NO: 484 - protein, 108 aa, synthetic construct
  REGION 1..108: note = Synthetic
SYELTQPPSVSVAPGQTARITCGGNNIGSKSVHWYQQKPGQAPVLVVYDDSDRPSGIPERFSGSNSGNTATLTISRVEAGDEADYYCQVWDSSSDLVVFGGGTKLTVL

SEQ ID NO: 485 - protein, 123 aa, synthetic construct
  REGION 1..123: note = Synthetic
EVQLLESGGGLVQPGGSLRLSCAASGFTFTSYAMSWVRQAPGKGLEWVSTISITGGSTYYADSVKGRFTISRDNSKYTLYLQMNSLRAEDTAVYYCAKDPYSGISYYYYMDVWGKGTTVTVSS

SEQ ID NO: 486 - protein, 108 aa, synthetic construct
  REGION 1..108: note = Synthetic
EIVLTQSPGTLSLSPGERATLSCRASQSVSSSYLAWYQQKPGQAPRLLIYGASSRATGIPDRFSGSGSGTDFTLTISRLEPEDFAVYYCQQYGSSPRTFGQGTKVEIK

SEQ ID NO: 487 - protein, 129 aa, synthetic construct
  REGION 1..129: note = Synthetic
QVQLVESGGGVVQPGRSLRLSCAASGFTFSSYGMHWVRQAPGKGLEWVAVIWYDGSDKYYADSVKGRFTISRDNSKNTLYLQMNSLRAEDTAVYYCARDGTGEFLEWLLPDALYYFDYWGQGTLVTVSS

SEQ ID NO: 488 - protein, 107 aa, synthetic construct
  REGION 1..107: note = Synthetic
DIQMTQSPSSLSASVGDRVTITCRASQSISSYLNWYQHKPGKAPKLLIYAASNLQSGVPSRFSGSGSGTDFTLTISSLQPEDFATYYCQQSYSIPPTFGGGTKVEIK

SEQ ID NO: 489 - protein, 129 aa, synthetic construct
  REGION 1..129: note = Synthetic
QVQLVESGGGVVQPGRSLKLSCAASGFTFSSYAMHWVRQAPRKGLEWVAVISYDGSNEYYADSVKGRFTISRDNSKNTLYLQMNSLRAEDTAVYYCARDGTGGFLEWLLPDALFYFDYWGQGTLVTVSS

SEQ ID NO: 490 - protein, 107 aa, synthetic construct
  REGION 1..107: note = Synthetic
DIQMTQSPSSLSASVGDRVTITCRASQSISSYLNWYQQKPGKAPKLLIYAASSLQSGVPSRFSGSESGTDFTLTISSLQPEDFATYYCQQSYSTPPTFGGGTKVEIK

SEQ ID NO: 491 - protein, 122 aa, synthetic construct
  REGION 1..122: note = Synthetic
QVQLVQSGPEVKKPGASVKVSCKVSGYTLIELGMHWVRQAPGKGLEWMGGFDPENVKTIYAQKFQGRVTMTEDTSTDTAYMELRSLTSEDTAIYYCATAGPLPYYYYCLDVWGQGTTVTVSS

SEQ ID NO: 492 - protein, 109 aa, synthetic construct
  REGION 1..109: note = Synthetic
EIVLTQSPGTLSLSPGERATLSCRASQSVSSSYLAWYRQKPGQAPRLLIYGASSRVTGIPDRFSGSGSGTDFTLTINRLEPEDFAVYYCQYYDTSPMYTFGQGTKLEIK

SEQ ID NO: 493 - protein, 128 aa, synthetic construct
  REGION 1..128: note = Synthetic
EVQLVQSGAEVKKPGESLQISCKGSGYRFSNHWIGWVRQVPGKGLEWMGVMNPGHSESTYSPSFQGQVTISVDESINTAYLQWSSLKASDTAMYYCARPDCVNCCSGGSCYVDAFDVWGQGTMVTVSS

SEQ ID NO: 494 - protein, 113 aa, synthetic construct
  REGION 1..113: note = Synthetic
DIVMTQTPLSLPVTPGESASISCRSSRSLLDNDDGNTYVDWYLQKPGQSPQLLMYLLSYRASGVPDRFSGSGSGTDFTLRISRVEAEDVGVYYCMQRIEFPWTFGQGTKVEIK

SEQ ID NO: 495 - protein, 123 aa, synthetic construct
  REGION 1..123: note = Synthetic
QLQLQESGPGLVKPSETLSLTCTVSGGSITSSSHYWGWVRQPPGKGLEWIGNIFYSGITYSNPSLESRLTIFVDTSKNQFSLKLRSVTAADTAVYYCARDVETYKYESTLDCWGQGILVTVSS

SEQ ID NO: 496 - protein, 106 aa, synthetic construct
  REGION 1..106: note = Synthetic
DIQMTQSPSSLSASVGDRVTITCRASQDIRSDLGWYQQKPGKAPKRLIYAASSLQSGVPSRFSGSGSGTEFTLTIHSLQPEDFATYYCLQHNSYPLTFGGGTKVEI

SEQ ID NO: 497 - protein, 122 aa, synthetic construct
  REGION 1..122: note = Synthetic
QVQLVQSGAEVKKPGASVKVSCMASGYNLSNYGISWVRQAPGQGLEWIGWSSVDNGHTNYAQKFQARVSMTTDTSTSTVYLELRSLRSDDTAVYFCARDHRTVVTFGTFDYWGQGVLVTVSS

SEQ ID NO: 498 - protein, 107 aa, synthetic construct
  REGION 1..107: note = Synthetic
DIQMTQSPSSLSASVGDRVTITCRASHNINTFLNWYQQKPGKAPNLLIYAPSILQSGVPPRFSGSGFGTDFTLTISSLQPDDFATYYCQQTYRTPFTFGPGTKVDIK

SEQ ID NO: 499 - protein, 121 aa, synthetic construct
  REGION 1..121: note = Synthetic
QVQLQQWGAGLLKPSETLSLTCAVYGGSFTGYYWSWIRQPPGKGLEWIGEVIHSGTSYYNPSLKSRVTISLDTSKNQFSLNLTSVTAADTAVYYCARGHPLVVVVKGFDPWGQGTLVTVSS

SEQ ID NO: 500 - protein, 107 aa, synthetic construct
  REGION 1..107: note = Synthetic
DIQMTQSPSSLSASVGDRVTITCRASQGIRNELGWYQQKPGKAPKPLIYAASSLQSGVPSRFSGSGSGTEFTLTISSLQPEDFATYYCLQHYTYPRTFGQGTKLEIK

SEQ ID NO: 501 - protein, 124 aa, synthetic construct
  REGION 1..124: note = Synthetic
QVQLVQSGDDVKKPGASVKVSCKVSGYTLSELSMHWVRQAPGKGLEWMGGFDPENAKTIYAQKFQDRVTMTEDTFTDTAYMELSGLRSDDTGLYFCAAAFAVIGSPNNYYYYYGIDVWGQGTTV

SEQ ID NO: 502 - protein, 110 aa, synthetic construct
  REGION 1..110: note = Synthetic
QSVLTQPPSASGSPGQRVTISCSGSNSNIGNTFIYWYQQLPGTAPKLLIFRNDQRPSGVPDRFSGSKSGTSASLAISGLRSEDEAAYYCAAWIDSLSAWVFGGGTMLTVV

SEQ ID NO: 503 - protein, 128 aa, synthetic construct
  REGION 1..128: note = Synthetic
QVQLVQSGAEVKKPGASVKVPCRVSGYTLSELSIHWVRQAPGKGLEWMGGFDPEDGTTVYAQKFQGRVSMTEDTSTDTAYMELSSLRSEDTAVYYCATGYAVTGTPQNYQYYYGLDFWGQGTTVTVSS

SEQ ID NO: 504 - protein, 107 aa, synthetic construct
  REGION 1..107: note = Synthetic
EIVLTQSPGTLSLSPGERATLSCRASQSVRNNYLAWYQQKPGQAPRLLIYGVSSRATDIPDRFSGSGSGTDFTLTISRLEPEDFAVYYCQKYGSSHSFGQGTKLEIK

SEQ ID NO: 505 - protein, 126 aa, synthetic construct
  REGION 1..126: note = Synthetic
QVQLVESGGGVVQPGGSLRLSCVASGFTFSNYAMHWVRQAPGKGLEWLAVTSSGGGDTYYADSGEGRFIVSRDNFRNTLFLHLNSLRPEDTAVYYCARDLFDTSGYLQIVGVFDVCGQGTMVTVSS

SEQ ID NO: 506 - protein, 107 aa, synthetic construct
  REGION 1..107: note = Synthetic
DIQMTQSPSTLSASVGDRVTITCRASQSISNWLAWYQQKPGKAPKVLIHKASTLESGVPSRFSGSEFGTDFTLTISSLQADDFATYYCQQYYSYPLTFGQGTKVEIK

SEQ ID NO: 507 - protein, 127 aa, synthetic construct
  REGION 1..127: note = Synthetic
EVQLVESGGGLVKPGGSLRLSCVASGFTFSSYSMNWVRQVPGKGLEWLLSISSSSSYRYYGDSVKGRFTISRDNANNTLYLQMSRLRAEDTAVYFCARDLVEGGDLGRVGSYYMDVWGKGTTVTVSS

SEQ ID NO: 508 - protein, 107 aa, synthetic construct
  REGION 1..107: note = Synthetic
DIQMTQSPSSLSASVGDTVTITCRASQGIRNDLGWYQHKPGRAPKLLISAASTLQSGVPSRFTGSGSGTVFTLTISSLQPEDFATYYCLQDYLYPRTFGQGTKLEIK

SEQ ID NO: 509 - protein, 127 aa, synthetic construct
  REGION 1..127: note = Synthetic
EVQLLESGGDLVQPGGSVRISCAASGFSFSSHAMSWVRQAPGKGLEWVSSFSGTTISIYYADAAKGRFTISRDNSKNTLYLQMNSLRVEDTAIYYCARGVRLVPGDFWDNYWYFDLWGRGTLVTVSS

SEQ ID NO: 510 - protein, 110 aa, synthetic construct
  REGION 1..110: note = Synthetic
QSALTQPPSASGSPGLSVTIACTGTSSDVGGYKYVSWYQQHPGKAPKLLIYEVTKRPSGVPDRFSGSKSGITASLTVSGLQAEDEADYFCSSYAGSNNLVFGGGTKLTVL

SEQ ID NO: 511 - protein, 118 aa, synthetic construct
  REGION 1..118: note = Synthetic
EVQLLESGGGFVQRGGSLRLSCVASGFSLSSDAMSWVRQAPGKGPEWVAAISPSATATYYTDSVEGRFTISRDNSKNTLFLQMNSLRAEDTAIYYCAKDPLGLLFFDFWGQGTLVTVS

SEQ ID NO: 512 - protein, 106 aa, synthetic construct
  REGION 1..106: note = Synthetic
DIQMTQSPSTLSASVGDRVTITCRASQSISSWLAWYQQKPGKAPKLLIYEASSLESGVPSRFSGSGSGTEFTLTISSLQPDDFATYYCQQYNTYSTFGQGTKVEIK

SEQ ID NO: 513 - protein, 125 aa, synthetic construct
  REGION 1..125: note = Synthetic
EVQLVQSGAEVKKPGESLRISCKASGYSFTHFWISWVRQTPAKGLEWMGRIDPSDSSTTYSPSFQGHVTISIDKSLNTAFLQWSSLKAWDTAMYFCAREPRITVLGVLDHWFDPWGQGTLVTVSS

SEQ ID NO: 514 - protein, 110 aa, synthetic construct
  REGION 1..110: note = Synthetic
QSVLTQPPSVSGTPGQRVTISCSGGSSNIGRNYVYWYQQLPGTAPKLLIYSNIQRPSGVPDRFSGSKSGTSASLANSGLRSEDEADYYCAAWDDSLSAWVFGGGTKLTVL

SEQ ID NO: 515 - protein, 125 aa, synthetic construct
  REGION 1..125: note = Synthetic
EVQLLESGGGLVQPGGSLRLSCAASGFTFKNYAMTWVRQAPGKGLEWVSAISDNGGNIYYADSVKGRFTVSRDNSKNTLYLQMNRLRADDTAVYYCAKDGGTVQVFLWAYYFDYWGQGALVTVSS

SEQ ID NO: 516 - protein, 112 aa, synthetic construct
  REGION 1..112: note = Synthetic
QSALTQPASVSGSPGQSVTISCTGNSNDVGSYNLVSWYQQHPGKAPKVIIFDVNKRPSGVSARFSGSKSGNTASLTISGLQAEDEADYYCCSYSGATTLHVLFGGGTKLTVL

SEQ ID NO: 517 - protein, 129 aa, synthetic construct
  REGION 1..129: note = Synthetic
QVQLQESGPGLVKPSQTLSLTCTVSGGSISSGSYYWSWIRQPAGKGLEWIGRIYTSGSTNYNPSLKSRVTISVDTSKNQFSLKLSSVTAADTAVYYCAREPHRLYYYDNSDYANAFDIWGQGTMVTVSS

SEQ ID NO: 518 - protein, 110 aa, synthetic construct
  REGION 1..110: note = Synthetic
QSALTQPASVSGSPGQSITISCTGTSSDVGSYNLVSWYQQHPGKAPKLLIYEVSKRPSGVSNRFSGSKSGNTASLTISGLQAEDEADYYCCSYAGSRIWVFGGGTKLTVL

SEQ ID NO: 519 - protein, 124 aa, synthetic construct
  REGION 1..124: note = Synthetic
QVQLVQSGAEVKKPGSSVNVSCKASGGTFSRYGFSWVRQAPGQGLEWMGRIIPILGTADYAQKFLGRVTLTADKSASTSNMELTSLNSEDTAVYYCATMNSGTLVNGELTPDYWGQGTLVTVSS

SEQ ID NO: 520 - protein, 107 aa, synthetic construct
  REGION 1..107: note = Synthetic
DIQMTQSPSSLSASVGDRVTITCRASQRISGFLNWYQQKPGKAPELLISAASRLQSGVPSRFSGSGSGTDFTLTISSLQPEDFATYYCQQSYITPITFGQGTRLEIK

SEQ ID NO: 521 - protein, 124 aa, synthetic construct
  REGION 1..124: note = Synthetic
QVQLVQSGAEVKKPGASVKVSCRASGNTFSSYDINWVRQATGQGLEWMGWMNPNSGKTGYAQKFQGRVTMTRNTSMTTAYMELSSLRSEDTAVYYCARGLRVHEWLATRGMDVWGQGTTVTVSS

SEQ ID NO: 522 - protein, 107 aa, synthetic construct
  REGION 1..107: note = Synthetic
DIQMTQSPSSLSASVGDRVTIACRASQDISNSLAWYQQRPGKAPKFLLYAASRLESGVPSRFSGSGSGTDYTLTISSLQPEDFATYYCQQYYDKPLTFGGGTKVEIK

SEQ ID NO: 523 - protein, 123 aa, synthetic construct
  REGION 1..123: note = Synthetic
QVQLQESGPGLVKPSETLSLTCSVSAGSISIYHWSWIRQPPGKGLEWIGYIYYSGSTNYNPSLKSRVTISIDTSKNQFSLKLSSVTAADTAVYYCAGGIDATPVGYYYGMDVWGQGTTVTVSS

SEQ ID NO: 524 - protein, 107 aa, synthetic construct
  REGION 1..107: note = Synthetic
SYELTQPPSVSVSPGQTASITCSGDKLGDQYAFWYQQKPGQSPVLVIYQDTKRPSGIPERFSGSNSGNTATLTISGTQAMDEADYYCQAWDSSTYVVFGGGTKLTVL

SEQ ID NO: 525 - protein, 124 aa, synthetic construct
  REGION 1..124: note = Synthetic
EVQLLESGGGLIQPGGSLRLSCAASGFTFSSYAMMWVRQAPGKGLDWVSAISTSGSATHYADSVKGRFTISRDNSKNTLYLQMNSLRFEDTAVYYCAKDPHPYSSSWYGWLDPWGQGTLVTVSS

SEQ ID NO: 526 - protein, 107 aa, synthetic construct
  REGION 1..107: note = Synthetic
DIQMTQSPSSLSASVGDRVTITCRASQGIRDDLGWYQQKPGKAPKRLIFAASSLQSGVPSRFSGSGSGTEFTLTISSLQPEDFATYYCLQHNTYPLTFGGGTKVEIK

SEQ ID NO: 527 - protein, 124 aa, synthetic construct
  REGION 1..124: note = Synthetic
EVQLVESGGGLVQPGRSLRLSCVASGFIFEDYAMHWVRQAPGKGLEWVSGISWNSGTRGYADSVKGRFSVSRDNAKNTLYLEMDRLRVEDTALYYCAKDGGLRYQLMSDGMDVWGQGTTVTVSS

SEQ ID NO: 528 - protein, 112 aa, synthetic construct
  REGION 1..112: note = Synthetic
DVVMTQSPLSLPVTLGQPASISCRSSHSLVYSDGNTYLNWFQQRPGQSPRRLIYKVSTRDSGVPDRFSGSGSGTDFTLKISRVEAEDVGVYYCMQSIFWPRTFGQGTKLEIK

SEQ ID NO: 529 - protein, 127 aa, synthetic construct
  REGION 1..127: note = Synthetic
QVQLQESGPRLVKPSETLSLTCTVSGGSVSTYYWSWLRQPPGKGLEWIGYIYYSGSTNYNFSLKSRLTISVDTSKSQFSLKLSSVTAADTAIYYCARERFILGSGSESHYNGPFDYWSQGTLVTVSS

SEQ ID NO: 530 - protein, 113 aa, synthetic construct
  REGION 1..113: note = Synthetic
DIVMTQSPDSLAVSLGERATINCKSSQSVLFSSNNKNYLAWYQQKPGQPPKLLFYWASTRGSGVPDRFSGSGSGTDFTLTISSLQAEDVAVYYCQQYYNSPRTFGQGTKVEIK

SEQ ID NO: 531 - protein, 123 aa, synthetic construct
  REGION 1..123: note = Synthetic
QVQLQESGPGLVKPSETLSLTCIVSGSSISSYYWSWIRQPPGKGLEWIGYIYYTGSTNYNPSLKSRVTISVDTSKNQFSLKLTSVTAADTAVYYCARENFDVTSYYNGWFDPWGQGTLVTVSS

SEQ ID NO: 532 - protein, 113 aa, synthetic construct
  REGION 1..113: note = Synthetic
DIVMTQSPDSLAVSLGERATINCKSSQSVLYSSNNKNYLAWYQQKPGQPPKLLIYWASTRESGVPDRFSGSGSGTDFTLTISSLQADDVAVYYCQQYYNSPRTFGQGTKVEIK

SEQ ID NO: 533 - protein, 118 aa, synthetic construct
  REGION 1..118: note = Synthetic
EVQLLESGGGLVQPGGSRRLSCAASGFTFSIAAMSWVRQAPGKGLEWVSVISTSGGTSYYADSVRGRFTISRDNSQNTLYLQMNSLSAEDTAIYYCAKDLGSYFPDYWGQGTLVTVSS

SEQ ID NO: 534 - protein, 108 aa, synthetic construct
  REGION 1..108: note = Synthetic
DIQMTQSPSSLSASVGDRVTITCRASQGIRNDIGWYQQKPGKAPKRLIHAASSLQSGVPSRFSGSGSGTEFTLTISSLQPEDFATYYCLQYNSYPRVTFGPGTKVDIK

SEQ ID NO: 535 - protein, 124 aa, synthetic construct
  REGION 1..124: note = Synthetic
EVQLLESGGGLVQPGGSLRLSCAAAGFTFTTSGMTWVRQAPGKGLEWVSSISVSGGSTYYAASVKGRFTVARDNAKNTLYLEMNSLRAEDTAVYYCAKDRGWGVEEAGTYLDHWGQGTLVTVSS

SEQ ID NO: 536 - protein, 110 aa, synthetic construct
  REGION 1..110: note = Synthetic
QSALTQPASVSGSPGQSITISCTGTSSDIGAYNYVSWYQHHPGKAPKVLIYEVSNRPSGVSIRFSGSKSGNTASLTISGLQAEDEANYYCSSYRSDSTVTFGGGTKLTVL

SEQ ID NO: 537 - protein, 124 aa, synthetic construct
  REGION 1..124: note = Synthetic
EVQLLESGGGLVQPGGSLRLSCAASGFTFSNYVMNWVRQAPGKGLEWVSTLSGSGGSIYYADSVKGRFTISRDNSKNTLYLQMNSLRAEDTAVYYCAKDPSGSHIYYHYYMDVWGKGTTVTVSS

SEQ ID NO: 538 - protein, 111 aa, synthetic construct
  REGION 1..111: note = Synthetic
QSALTQPASVSGSRGQSITISCTGTSSDVGSYNLVSWYQQHPGKVPKVMIYEVNKRPSGVPNRFSGSKSGNTASLTISGLQAEDEADYYCCSYAGSSNSYVIFGGGTKLTV

SEQ ID NO: 539 - protein, 124 aa, synthetic construct
  REGION 1..124: note = Synthetic
EVQLLESGGGLVQPGGSLRLSCAASGFSFSSYVMVWVRQAPGKGLEWVSLISGSGLITYYADSVKGRFTISRDNSKKTLFLQMNSLRVEDTAVYYCAKDGSMATHYYHYYMDVWGKGTTVTVSS

SEQ ID NO: 540 - protein, 112 aa, synthetic construct
  REGION 1..112: note = Synthetic
QSALTQPASVSGSPGQSITISCTGTSSDVGSFNLVSWYQQHPGKAPKLIIYEGNKRPSGISSRFSGSKSGNTASLTISGLQAEDEADYYCSSYAGITTFYVVFGGGTKLTVL

SEQ ID NO: 541 - protein, 124 aa, synthetic construct
  REGION 1..124: note = Synthetic
EVQLLESGGGLVQPGGSLRLSCAASGFAFRNYVMIWVRQAPGKGLEWVSAIGGSGGSIYYGDSVKGRFTTSRDNSKNTLYLQMNNLRAEDAATYFCAKDGGVESHYYYYYMDVWGKGTTVTVSS

SEQ ID NO: 542 - protein, 112 aa, synthetic construct
  REGION 1..112: note = Synthetic
QSALTQPASVSGSPGQSITISCTGTSSDVGSYNLVSWYQQHPGKAPKLMIYDVSKRPSGVSNRFSGSKSGNRASLTISGLQAEDEADYYCCSYAGTTTSFYVFGTGTQVTVL

SEQ ID NO: 543 - protein, 117 aa, synthetic construct
  REGION 1..117: note = Synthetic
QVQLVESGGGVVQSGGSLRLSCAASGFSFSNYGMHWVRQAPGKGLQWVAFIRYDGTSKYYADSVRGRFSVSRDNSKNTLYLQMNSLRPEDTAVYYCATFIFIAFDYWGQGTLVTVSS

SEQ ID NO: 544 - protein, 110 aa, synthetic construct
  REGION 1..110: note = Synthetic
QSALTQPHSVSGSPGQSVTISCTGTSSDVGTYHAVSWYQQHPGKAPKLMIFDVTKRPSGVPDRFSGSRSGNTASLTISGLQAEDEAEYYCCSYASSYSYIFGPGTKVTVL

SEQ ID NO: 545 - protein, 123 aa, synthetic construct
  REGION 1..123: note = Synthetic
EVQLVESGGGLVQPGGSLRLSCAASGFTFSSYWMHWVRQAPGKGLVWVSHISSDEYIINYSASVKGRFTISRDNAKNTLYLQMNSLRAEDTAVYYCARSNGGLEWVSDAFDIWGQGTMVTVSS

SEQ ID NO: 546 - protein, 107 aa, synthetic construct
  REGION 1..107: note = Synthetic
SYELTQPPSVSVSPGQTARITCSGDALANQYVYWYQQKPGQAPVLVIYKDNERPSGIPERYSGSSSGTTVTLTISGVQAEDEADYYCQSADSNSNWVFGGGTKLTVL

SEQ ID NO: 547 - protein, 126 aa, synthetic construct
  REGION 1..126: note = Synthetic
EVQLLESGGGLVQPGGSLRLSCAASGFTFTSSGMSWVRQAPGKGLEWVSSISVSGASTYYADSVKGRFTISRDNSKNTLHLQMNSLRAEDTAVYFCAKQGSSGITMEEVVIPFDYWGQGTLVTVSS

SEQ ID NO: 548 - protein, 107 aa, synthetic construct
  REGION 1..107: note = Synthetic
DIQMTQSPSSLSASVGDRVTITCRASQSISRYLNWYQQRPGKAPKLLIYAASSLQSGVPSRFSGSGSGTDFTLTIRSLQPEDFATYYCHQSYSTLWTFGQGTKVEIK

SEQ ID NO: 549 - protein, 124 aa, synthetic construct
  REGION 1..124: note = Synthetic
EVQLVESGGGLVQPGGSLRLSCTASGFTFNDHWMNWVRQAPGKGLEWVASIKHDGNEKYYVDSVKGRFTISRDNAKNSVYLQMNSLRADDTAIYYCARGARFLEWLPQSPFDYWGQGTLVTVSS

SEQ ID NO: 550 - protein, 107 aa, synthetic construct
  REGION 1..107: note = Synthetic
DIQMTQSPSSLSASVGDRVTITCRASQDISNSLAWYQQKPGKAPKFLLYAASRLGSGIPSRFSGSGSGTDYTLTISSLQPEDFAIYYCQQYYDTPLTFGGGTKVEIK

SEQ ID NO: 551 - DNA, 367 bp, synthetic construct
  misc_feature 1..367: note = Synthetic
  source 1..367: mol_type = other DNA
caggtccagctggtacagtctggggctgaggtgaagaagcctggggcctcagtgaaggtctcctgcaaggtttccggatacaccctcactgaattatccatgcactgggtgcgacaggctcctggaaaagggcttgagtggatgggaggttttgatcctgaagatggtgaaacaatctacgcacagaagttccagggcagagtcaccatgaccgaggacacatctacagacacagcctacatggagctgagcagcctgagatctgaggacacggccgtgtattactgtgcaacaggttatgcatattgtggtggtgactgccttattgactactggggccagggaaccctggtcaccgtctcctcag

SEQ ID NO: 552 - DNA, 325 bp, synthetic construct
  misc_feature 1..325: note = Synthetic
  source 1..325: mol_type = other DNA
cagtctgtgctgactcagccaccctcagcgtctgggacccccgggcagagggtcaccatctcttgttctggaagcagctccaacatcggaagtaattatgtatactggtaccagcagctcccaggaacggcccccaaactcctcatctataggaataatcagcggccctcaggggtccctgaccgattctctggctccaagtctggcacctcagcctccctggccatcagtgggctccggtccgaggatgaggctgattattactgtgcagcatgggatgacagcccggtggtattcggcggagggaccaagctgaccgtcctag

SEQ ID NO: 553 - DNA, 364 bp, synthetic construct
  misc_feature 1..364: note = Synthetic
  source 1..364: mol_type = other DNA
caggtccagctggtacagtctggggctgaggtgaagaggcctggggcctcagtgaaggtctcctgcaaggtttccggatacaccctcactgaattatccattcactgggtgcgacaggctcctggaaaagggcttgagtggatgggaggttttgatcctgaatatggtgaaacaatctacgcacagaaattccagggcagagtcaccatgaccgaggacacatctacagacacagcctacatggagctgagcagcctgagatctgaggacacggccgtgtattactgtgcaacagcccccgcgattacgatttctggatggctcgacccctggggccagggaaccctggtcaccgtctcctcag

SEQ ID NO: 554 - DNA, 334 bp, synthetic construct
  misc_feature 1..334: note = Synthetic
  source 1..334: mol_type = other DNA
cagtctgccctgactcagcctccctccgcgtccgggtctcctggacagtcagtcaccatctcctgcactggaaccagcagtgacgttggtggttataactatgtctcctggtaccaacagcacccaggcaaagcccccaaactcatgatttatgaggtcagtcagcggccctcaggggtccctgatcgcttctctggctccaagtctggcaacacggcctccctgaccgtctctgggctccaagctgaggatgaggctgattattactgcagctcatatgcaggcagcaacaattatgtggtattcggcggagggaccaagctgaccgtcctag

SEQ ID NO: 555 - DNA, 367 bp, synthetic construct
  misc_feature 1..367: note = Synthetic
  source 1..367: mol_type = other DNA
caggtccagctggtacagtctggggctgaggtgaagaagcctggggcctcagtgaaggtctcctgcaaggtttccggatacaccctcattgaattatccatacactgggtgcgacaggctcctggaaaagggcttgagtggatgggaggttttgatcctgaagatgctgaaacaatctacgcacagaagttccagggcagagtcaccatggccgaggacacatctacagacacagcctacatggagctgagcagcctgagatctgaggacacggccgtctattactgtacagcaggtcccgcgtatagtagtggctggttccccccttggtactggggccagggaaccctggtcaccgtctcctcag

SEQ ID NO: 556 - DNA, 334 bp, synthetic construct
  misc_feature 1..334: note = Synthetic
  source 1..334: mol_type = other DNA
cagtctgtgctgactcagccgccctcagtgtctgcggccccaggacagaaggtcaccatctcctgctctggaagcagctccaacattggcaataattatgtatcctggtaccagcaactcccaggaacagcccccaaactcctcatctatgaaaataataagcgaccctcagggattcctgaccgattctctggctccaagtctggcacgtcagccaccctgggcatcaccggactccagactggggacgaggccgattattactgcggaacatgggatagcagcctgagtgctggaggggtgttcggcggagggaccaagctgaccgtcctag

SEQ ID NO: 557 - DNA, 381 bp, synthetic construct
  misc_feature 1..381: note = Synthetic
  source 1..381: mol_type = other DNA
caggtgcagctggtggagtctgggggaggcgtggtccagcctgggaggtctttgagactctcctgtgcagcctctggattcaccttcagtagctatggcatgcactgggtccgccaggctccaggcaaggggctggagtgggtggcagttatatcatttgatggaagtaataaatactatgcagactccgtgaagggccgattcaccatctccagagacaattccaagaacacgctgtatctgcaaatgaacagcctgagagctgaggacacggctatgtattactgtgcgaaggtgcatgggtataacagtagccccggggctttctattactacggtatggacgtctggggccaagggaccacggtcaccgtctcctca

SEQ ID NO: 558 - DNA, 322 bp, synthetic construct
  misc_feature 1..322: note = Synthetic
  source 1..322: mol_type = other DNA
tcctatgagctgacacagccactctcagtgtcagtggccctgggacagacggccaggattacctgtgggggaaacaacattggaagtaaaaatgtgcactggtaccagcagaagccaggccaggcccctgtgctggtcatctatagggattacaaccggccctctgggatccctgagcgattctctggctccaactcggggaacacggccaccctgaccatcagcagagcccaagccggggatgaggctgactattactgtcaggtgtgggacagcagctcgtctgtggtattcggcggagggaccaagctgaccgtcctag

SEQ ID NO: 559 - DNA, 378 bp, synthetic construct
  misc_feature 1..378: note = Synthetic
  source 1..378: mol_type = other DNA
gaggtgcagctgttggagtctgggggaggcttggtacagcctggggggtccctgagactctcctgtgcagtctctggattcacctttagcagctatgccatgagctgggtccgccaggctccagggaaggggctggagtgggtctcaagtattagtggtagtggtggtagcacatataacgcagactccgtgaagggccggttcaccatctccagagacaattccaagaacacgctgtatctgcaaatgaacagcctgagagccgaggacacggccgtatattactgtgcgaaatgcgggttcgggaccccaccccccacttactactactactacggtatggacgtctggggccaagggaccacggtcaccgtctcc

SEQ ID NO: 560 - DNA, 325 bp, synthetic construct
  misc_feature 1..325: note = Synthetic
  source 1..325: mol_type = other DNA
gacatccagttgacccagtctccatccttcctgtctgcatctgtaggagacagagtcaccatcacttgtcgggccagtcagggcattagcagttatttagcctggtatcagcaaaaaccagggaaagcccctaagctcctgatctatgctgcatccactttgcaaagtggggtcccatcaaggttcagcggcagtggatctgggacagaattcactctcacaatcagcagcctgcagcctgaagattttgcaacttattactgtcaacaccttaatagttaccctcgactcactttcggcggagggaccaaggtggagatcaaac

SEQ ID NO: 561 - DNA, 382 bp, synthetic construct
  misc_feature 1..382: note = Synthetic
  source 1..382: mol_type = other DNA
caggtgcagctggtggagtctgggggaggcctggtcaagcctggggggtccctgagactctcctgtgcagcctctggattcaccttcagtagtaatagcatgaactgggtccgccaggctccagggaaggggctggaatgggtctcatccactagtagtagtagtagttacatatactacgcagactcagtgaagggccgattcaccatctccagagacaacgccaagaactcactgtatctgcaaatgaacagcctgagagccgaggacacggctgtgtattactgtgcgagagccgctcctcattactatgatagtagtggttattaccccacccctttggactactggggccagggaaccctggtcaccgtctcctcag

SEQ ID NO: 562 - DNA, 325 bp, synthetic construct
  misc_feature 1..325: note = Synthetic
  source 1..325: mol_type = other DNA
gaaatagtgatgacgcagtctccagccaccctgtctgtgtctccaggggaaagagccaccctctcctgcagggccagtcagagtgttagcagcaacttggcctggtaccagcagaaacctggccaggctcccaggctcctcatctatggtgcatccaccagggccactggtatctcagccaggttcagtggcagtgggtctgggacagagttcactctcaccatcagcagcctgcagtctgaagattttgcagtttattactgtcagcagtattataactggcctccgtggacgttcggccaagggaccaaggtggaaatcaaac

SEQ ID NO: 563 - DNA, 387 bp, synthetic construct
  misc_feature 1..387: note = Synthetic
  source 1..387: mol_type = other DNA
caggtgcagctggtggagtctgggggaggcctggtcaagcctggggggtccctgagactctcctgtgcagcctctggattcaccttcagtacctatggcatgaactgggtccgccaggctccagggaaggggctggagtgggtctcatccattagtagtagtagtagttacatatactacgcagactcagtgaagggccgattcaccatctccagagacaacgccaagaactcactgtctctgcaaatgaacagcctgagagccgaggacacggctgtctattactgtgcgagagatctggagttagcagctcgtccctctgaatgggattactactacttcggtatggacgtctggggccaagggaccacggtcaccgtctcctca

SEQ ID NO: 564 - DNA, 325 bp, synthetic construct
  misc_feature 1..325: note = Synthetic
  source 1..325: mol_type = other DNA
gaaatagtgatgacgcagtctccagccaccctgtctgtgtctccaggggaaagagccaccctctcctgcagggccagtcagagtgttgccagcaacttggcctggtaccagcagaaacctggccaggctcccaggctcctcatctatggtgcatccaccagggccactggtatcccagccagattcagtggcagtgggtctgggacagacttcactctcaccatcagcagcctgcagtctgaagattttgcagtttattactgtcatcagtattataactggcctccgtggacgttcggccaagggaccaaggtggaaatcaaac

SEQ ID NO: 565 - DNA, 391 bp, synthetic construct
  misc_feature 1..391: note = Synthetic
  source 1..391: mol_type = other DNA
caggttcagctggtgcagtctggagctgaggtgaagaagcctggggcctcagtgaaggtctcctgcaaggcttctggttacacctttaccagctatggtatcagctgggtgcgacaggcccctggacaagggcttgagtggatgggatggatcagcgcttacaatggtaacacaaactatgcacagaagctccagggcagagtcaccatgaccacagacacatccacgagcacagcctacatggagctgaggagcctgagatctgacgacacggccgtgtattactgtgcgagagcattaacccgatcgtattactatggttcggggagttactactacaacaactggttcgacccctggggccagggaaccctggtcaccgtctcctcag

SEQ ID NO: 566 - DNA, 334 bp, synthetic construct
  misc_feature 1..334: note = Synthetic
  source 1..334: mol_type = other DNA
cagtctgccctgactcagcctgcctccgtgtctgggtctcctggacagtcgatcaccatctcctgcactggaaccagcagtgacgttggtggttataactatgtctcctggtaccaacagcacccaggcaaagcccccaaactcatgatttatgatgtcactaatcggccctcaggggtttctaatcgcttctctgcctccaagtctggcaacacggcctccctgaccatctctgggctccaggctgaggacgaggctgattattactgcagctcatatacaagcagcagcactctttgggtgttcggcggagggaccaagctgaccgtcctag

SEQ ID NO: 567 - DNA, 379 bp, synthetic construct
  misc_feature 1..379: note = Synthetic
  source 1..379: mol_type = other DNA
caggtgcagctggtggagtctgggggaggcctggtcaagcctggggggtccctgagactctcctgtgcagcctctggattcaccttcagtagctatagcatgaactgggtccgccaggctccagggaaggggctggagtgggtctcatccattagtagtagtagtagttacatatactacgcagactcagtgaagggccgattcaccatctccagagaccacgccaagaactcactgtatctgcaaatgaacagcctgagagccgaggacacggctgtgtattactgtgcgagagcccaaaattactatggtactagtggttattaccccgagggcttggactactggggccagggaaccctggtcaccgtctcctcag

SEQ ID NO: 568 - DNA, 325 bp, synthetic construct
  misc_feature 1..325: note = Synthetic
  source 1..325: mol_type = other DNA
gaaatagtgatgacgcagtctccagccaccctgtctgtgtctccaggggaaagagccaccctctcctgcagggccagtcagagtgttagcagcaacttagcctggtaccagcagaaacctggccaggctcccaggctcctcatctatggtgcatccaccagggccactggtatcccagccaggttcagtggcagtgggtctgggacagagttcactctcaccatcagcagcctgcagtctgaagattttgcagtttattactgtcagcagtataataactggcctccgtggacgttcggccaagggaccaaggtggaaatcaaac

SEQ ID NO: 569 - DNA, 364 bp, synthetic construct
  misc_feature 1..364: note = Synthetic
  source 1..364: mol_type = other DNA
caggtccagctggtacagtctggggctgaggtgaagaagcctggggcctcagtgaaggtctcctgcaaggtttccggatacaccctccctgaattatccattcactgggtgcgacaggctcctggaaaagggcttgagtggatgggaggttttgatcctgaagatggtgaaacaatctacgcacagaagttccagggcagagtcaccatgaccgaggacacatctacagacacagcctacctggagctgagcagcctgagatctgaggacacggccgtgtattattgtgcagcaggacctgcagtaataaggggaggctggttcgacccctggggccagggaaccctggtcaccgtctcctcag

SEQ ID NO: 570 - DNA, 331 bp, synthetic construct
  misc_feature 1..331: note = Synthetic
  source 1..331: mol_type = other DNA
cagtctgccctgactcagcctgcctccgtgtctgggtctcctggacagtcgatcaccatctcctgcactggaaccagcagtgatgttgggagttataaccttgcctcctggtaccgacagcacccaggcaaagcccccaaactcatgatttatgagggcagtaagcggccctcaggggtttctaatcgcttctctggctccaagtctggcaacacggcctccctgacaatctctgggctccaggctgaggacgaggctgattatttctgctgctcatatgcaggtagtggcacttgggtgttcggcggagggaccaagctgaccgtcctag

SEQ ID NO: 571 - DNA, 396 bp, synthetic construct
  misc_feature 1..396: note = Synthetic
  source 1..396: mol_type = other DNA
caggtccagctggtacagtctggggctgaggtgaagaagcctggggcctcagtgaaggtctcctgcaaggtttccggatacagcctcattgaagtatccatgcactgggtgcgacaggctcctggaaaagggcttgagtggatgggaggttttgatcctgaagatgctgaaacaatctacgcacagaagttccagggcagagtcaccatgaccgaggacacatctacagacacagcctacatggagctgagcagcctgagatctgaggacacggccgtgtattactgtgcaacagatctcccatattgtagtggtgactgctatcccacggaggtgccaaaatactcctatggtatggacgtctggggccaagggaccacggtcaccgtctcctca

SEQ ID NO: 572 - DNA, 325 bp, synthetic construct
  misc_feature 1..325: note = Synthetic
  source 1..325: mol_type = other DNA
cagtctgccctgactcagcctgcctccgtgtctgggtctcctggacagtcgatcaccatctcctgcactggaaccagcagtgatgttgggagctataaccttgtctcctggtaccaacaacacccaggcaaagcccccaaactcatgatttatgagggcagtaagcggccctcaggggtctctaatcgcttctctggctccaagtctggcaacacggcctccctgacaatctctgggctccaggctgaggacgaggctgattattactgctgctcatatgcaggtaattgggtgttcggcggagggaccaagctgaccgtcctag

SEQ ID NO: 573 - DNA, 337 bp, synthetic construct
  misc_feature 1..337: note = Synthetic
  source 1..337: mol_type = other DNA
caggtccagctggtacagtctggggctgaggtgaagaagcctggggcctcagtgaaggtctcctgcaaggtttccggatacaccctcactgaattatccatgtactgggtgcgacaggctcctggaaaaggacttgagtggatgggaggttttgatcctgaggatggtgaaacaatctacgcacagaagttccagggcagagtcaccatgaccgaggacacatctacagacacagcctacatggagctgagcagcctgagatctgaggacacggccgtgtattactgtgcaacagatggtttgtggggccaagggacaatggtcaccgtctcttcag

SEQ ID NO: 574 - DNA, 325 bp, synthetic construct
  misc_feature 1..325: note = Synthetic
  source 1..325: mol_type = other DNA
tcctatgagctgactcagccaccctcggtgtcagtgtccccaggacaaacggccaggatcacctgctctggagatgcattgccaaaaaaatatgcttattggtaccagcagaagtcaggccaggcccctgtgctggtcatctatgaggacagcaaacgaccctccgggatccctgagagattctctggctccagctcagggacaatggccaccttgactatcagtggggcccaggtggaggatgaagctgactactactgttactcaacagacagcagtggtaatcattgggtgttcggcggagggaccaagctgaccgtcctag

SEQ ID NO: 575 - DNA, 367 bp, synthetic construct
  misc_feature 1..367: note = Synthetic
  source 1..367: mol_type = other DNA
gaggtgcagctggtggagtctgggggaggcttggtacagccagggcagtccctgagactctcctgtacagcttctggattcacctttggtgattatgctatgagctgggtccgccaggctccagggaaggggctggagtgggtaggtttcattagaagcaaaacttatggtgggacaacacaatacgccgcgtctgtgaaaggcagattcaccatctcaagagatgattccaaaagcatcgcctatctgcaaatgaacagcctgaaaaccgaggacacagccgtgtattgctgtactagactcgacaagtggggactaagttactttgactactggggccagggaaccctggtcaccgtctcctcag

SEQ ID NO: 576 - DNA, 331 bp, synthetic construct
  misc_feature 1..331: note = Synthetic
  source 1..331: mol_type = other DNA
cagtctgccctgactcagcctcgctcagtgtccgggtctcctggacagtcagtcaccatctcctgcactggaaccagcagtgatgttggtggttataactctgtctcctggtaccaacagcaccccggcgcagcccccaaactcatgatttatgatgtcaataagcggccctcaggggtccctgatcgcttctctggctccaagtctggcaacacggcctccctgaccatctctgggctccaggctgaggatgaggttgattattactgctgctcatatgcaggcagctactcctatgtcttcggaactgggaccaaggtcaccgtcctag

SEQ ID NO: 577 - DNA, 382 bp, synthetic construct
  misc_feature 1..382: note = Synthetic
  source 1..382: mol_type = other DNA
caggtgcagctgcaggagtcgggcccaggactggtgaagccctcacagaccctgtccctcacctgcactgtctctggtggctccatcagcagtggtcatgactactggagttgggtccgtcagcccccagggaagggcctggagtggattgggtacatctatcacagtgggagcacctactacaacccgtccctcaagagtcgagttaccatttcactggacacgtccaagaaccagttctccctgaggctgagctctgtgactgtcgcagacacggccgtgtattattgtgccagggagggccacgaggaggggtatgggggcccattaaatgatgtttttgatatctggggccaagggacaatggtcaccgtctcttcag

SEQ ID NO: 578 - DNA, 337 bp, synthetic construct
  misc_feature 1..337: note = Synthetic
  source 1..337: mol_type = other DNA
gacatcgtgatgacccagtctccagactccctggctgtgtctctgggcgagagggccaccatcaactgcaagtccagccagagtgttttattcagctccaacaataagaactacttagcttggtaccagcagaaaccaggacagcctcctaagttgctcatttactgggcatctacccgggaatccggggtccctgaccgattcagtggcagcgggtctgggacagatttcactctcaccatcagcagcctgcgggctgaagatgtggcagtttattactgtcagcaatattatagtcttcggacgttcggccaagggaccaaggtggaaatcaaac

SEQ ID NO: 579 - DNA, 379 bp, synthetic construct
  misc_feature 1..379: note = Synthetic
  source 1..379: mol_type = other DNA
caggtccagctggtacagtctggggctgaggtgaagaagcctggggcctcagtgaaggtctcctgcaaggtttccggatacaccctccctgaattatccatgcactgggtgcgacagactcctggaaaagggcttgagtggatgggaggttttcatcctgaagatgctgaaacaatctacgcacagaagttccagggcagagtcaccatgaccgaggacacatctacagacacagcctacatggagctgagcagcctgagagccgaggacacggccgtatattactgtgcaacaagccccccttattgtagtaatggtgtatgctatactcactggttcgacccctggggccagggaaccctggtcaccgtctcctcag

SEQ ID NO: 580 - DNA, 328 bp, synthetic construct
  misc_feature 1..328: note = Synthetic
  source 1..328: mol_type = other DNA
cagtctgtgctgactcagccgccctcagtgtctgcggccccaggacagaaggtcaccatctcctgctctggaagcagctccaacattgggaataattatgtttcctggtaccagcagctcccaggaacagcccccaaactcctcatctatgaaaataataagcgaccctcagggattcctgaccgattctctggctccaagtctggcacgtcagccaccctgggcatcaccggactccagactggggacgaggccgattattactgcggaacatgggatagcagcctgagtgccgtcttcggaactgggaccaaggtcaccgtcctag

SEQ ID NO: 581 - DNA, 382 bp, synthetic construct
  misc_feature 1..382: note = Synthetic
  source 1..382: mol_type = other DNA
gaggtgcagctggtggagtctgggggaggcttggtacagcctggagggtccctgcgactcgcctgtgtagcctctggattcaccttcagtatttatgaaatgaattgggtccgccaggctccagggaagggcctggagtgggtttcctacataactactagtggtcatgccagatataacgcagactctgtgaagggccgtttcaccatttccagagacaactccaagaactctttctatctacaaatgaacagcctgagagccgaggacacggctatttattattgtgcgagaccccaatatcactattatgatactagtacttatcactcgtatggttttgatatctggggccaagggacaatggtcaccgtctcttcag

SEQ ID NO: 582 - DNA, 334 bp, synthetic construct
  misc_feature 1..334: note = Synthetic
  source 1..334: mol_type = other DNA
cagcttgtgctgactcaatcgccctctgcctctgcctccctgggagcctcggtcaacctcacctgcactctgagcagtgggcacaacagctatgccatcgcatggcatcagcagcagccggagaagggccctcggtacttgatgagccttaacagtgacggcagccacactaagggggacgggatccctgatcgcttctcgggctccagctctggggctgagcgcttcctcaccatctccagcctccagtctgaggatgaggctgactattactgtcagacctgggacactggcattcgagtgttcggcggagggaccaggctgaccgtcctag

SEQ ID NO: 583 - DNA, 390 bp, synthetic construct
  misc_feature 1..390: note = Synthetic
  source 1..390: mol_type = other DNA
caggtgcagctggtggagtctgggggaggcgtcgtccagcctgggaggtccctgagactctcctgtgcagcctctggattcagtttcgataaatatgctctacactgggtccgccaggctccaggcaagggactggagtgggtggcagatatatcgtttgatggaagtcaaaaacaccacgcagactccgtgaagggccgattcaccatttccagagacaattccaagaacaccctttatctgcaaatgaacagcctgagagcggaggacacggctgtctattactgtgcgagggatttcgtactttgtagttcttccacctgccgtgggggagtatttctgggcggtatggacctctggggccaagggaccacggtcaccgtctcctca

SEQ ID NO: 584 - DNA, 322 bp, synthetic construct
  misc_feature 1..322: note = Synthetic
  source 1..322: mol_type = other DNA
gaaattgtgttgacacagtctccagccaccctgtctttgtctccaggagaaagagccaccctctcctgcagggccagtcagagtgttggcagctacttagcctggtaccaacaagtacctggccaggctcccaggctcctcatctatgatgcatccaacagggccactggcatccctcccaggttcagtggcagtgggtctgggacagacttcactctcaccatcagcagcctagagcctgcagattgtgcagtttattactgtcagcagcgtagcaactggcccttctctttcggcggagggaccaaggtggagatcaaac

SEQ ID NO: 585 - DNA, 364 bp, synthetic construct
  misc_feature 1..364: note = Synthetic
  source 1..364: mol_type = other DNA
caggtgcagctgcaggagtcgggcccaggactgctgaagccttcacagaccctgtccctcacctgcactgtctctagtggccccatgaacactggtaattactactggagttggatccgccagcccccagggaagggcctggagtggattggatacatacattacagagggagtacctactacgacccgtccctcaagagtcgagccaccatttcagtggacacgtccgaggaccagttctccctgatactgacctccgtgactgccgcagacacggccatatattactgtgccagagtaacaatgacctggagctggtacttcgatctctggggccgtggcaccctggtcaccgtctcctcag

SEQ ID NO: 586 - DNA, 325 bp, synthetic construct
  misc_feature 1..325: note = Synthetic
  source 1..325: mol_type = other DNA
cagtctgccctgactcagcctcgctcagtgtccgggtctcctggacagtcagtcaccatgtcctgcactggagccatcagtgatgttgcgaattataactatttctcctggtaccaacaacacccaggcagagcccccaaactcattctttttgacgtcaataagcggccctcaggggtccctgatcgcttctctggctccaggtctggcaacacggcctccctgaccatctctggactccaggctgaggatgaggctgaatattattgctgctcatatacagacacctgggtgttcggcggtgggaccaagctggccgtcctag

SEQ ID NO: 587 - DNA, 352 bp, synthetic construct
  misc_feature 1..352: note = Synthetic
  source 1..352: mol_type = other DNA
caggtgcagctgcaggagtcgggcccaggactggtgaagccttcggggaccctgtccctcacctgcgctgtctctggtgactccatcagcagtaatacctggtggagttgggtccgccagcccccagggaaggggctggagtggattggggaaatctttcatagtgggaacaccaactacaacccgtccctcaagagtcgactcaccatgtcaatagacaagtccaaaaaccaaatcaccctgaatctgacctctgtgaccgccgcggacacggccgtgtattattgtgcgagagggtggatagtatcagctgcccactggggccagggaaccctggtcaccgtctcctcag

SEQ ID NO: 588 - DNA, 330 bp, synthetic construct
  misc_feature 1..330: note = Synthetic
  source 1..330: mol_type = other DNA
cagtctgccctgactcagcctgcctccgtgtctgggtctcctggacagtcgatcaccatctcctgcactggaaccaacagtgatgttgggagttataaccttgtctcctggttccaacaacatccaggcaaagcccccaacctcatgatttttgagggcactaagcggccctcaggggtttctaatcgcttctctggctccaagtctggcaacacggcctccctgacaatctctgggctccaggctgaagacgaggctgactatttctgctgctcatatgcaggttttagcacttgggtcttcggcggagggaccaagctgagcgtccta

SEQ ID NO: 589 - DNA, 372 bp, synthetic construct
  misc_feature 1..372: note = Synthetic
  source 1..372: mol_type = other DNA
gaggtgcagctggtggagtcggggggcggcctggtccagccgggggggtccctgagactctcctgtgcagcctctggattcacgtttagtgactattggatgagttgggtccgccaggctccagggaaggggctggagtgggtggccaacataaaccaagatggaagtgaccattactctgtggactctgtgatgggccgattcaccatctccagagacaacgccaagagatcactctctctgcacatggacagcctgagagccgaagacacggctgtctattactgtgcgagacacaacagtacttatccttactactacttctatggtatggacgtctggggccgagggaccacggtcaccgtctcctca

SEQ ID NO: 590 - DNA, 322 bp, synthetic construct
  misc_feature 1..322: note = Synthetic
  source 1..322: mol_type = other DNA
gacatccagatgacccagtctccatcttccctgtctgcatttgtaggagacagagtcaccatcacttgccgggcaagtcagggcattagaaatgatttaggctggtatcagcagaaatcaggaaaagcccctaaactcctcatctatgctgcatccgggttacaaagtggggtcccgtcaaggttcagcggcagtggatctggcacagatttcactctcaccatcagcagcctgcagcctgaagatttcgcaacttattactgtctacaagatcacacttatccgctcactttcggcggagggaccaaggtggagatcaaac

SEQ ID NO: 591 - DNA, 366 bp, synthetic construct
  misc_feature 1..366: note = Synthetic
  source 1..366: mol_type = other DNA
caggttcagctggtgcagtctggagctgaggtgaagaagcctggggcctcagtgaaggtctcctgcaaggcttctggttacagctttaccagctacggtatcagctgggtgcgacaggcccctggacaagggcttgagtggatgggatggatcagcggttacaatggcaacacagactatgcacagaggttccagggcagagtcaccttgaccacagacacatccacgagcacagcctccatggaggtgaggagcctgacatctgacgacacggccgtgtacttctgtgcgagagatgggagttggcgtttgtctgactacgctatggacgtctggggccaagggaccacggtcaccgtctcctca

SEQ ID NO: 592 - DNA, 334 bp, synthetic construct
  misc_feature 1..334: note = Synthetic
  source 1..334: mol_type = other DNA
cagtctgtgctgacgcagccaccctcagcgtctggtatccccgggcagagggtcaccatcccttgttctggaagcagctccaacatcggcactaatcatgtctgctggtaccagcagtacccaggaacggcccccaaactcctcatctataggaataatcagcggccctcaggggtccctgaccgattctctggctccaagtctggcacctcagcctccctggccatcagtgggctccgctccgaggatgaggctgattatttctgtgctacatgggatggcagcctgagtaatctttgggtgtccggcggagggaccaagctgaccgtcctag

SEQ ID NO: 593 - DNA, 379 bp, synthetic construct
  misc_feature 1..379: note = Synthetic
  source 1..379: mol_type = other DNA
caggtccagctggtacagtctggggctgaggtgaagaagcctggggcctcagtgagggtctcctgcagggtttccggattcaccctccctgaattatccatacactgggtgcgacagcctcctggaaaagggcttgagtggatgggaggttttgatcctcagtctggtgcaacaatctacgcacagaacttccagggcagagtcaccctgaccgaggacacatctacagacacagccttcatggacctaaagagcctgagatctgaggacacggccgtatattattgtgcaatttccaccccccattgtagtagtcccaactgctatgtcaactggttcgacccctggggccagggaaccctggtcaccgtctcctcag

SEQ ID NO: 594 - DNA, 337 bp, synthetic construct
  misc_feature 1..337: note = Synthetic
  source 1..337: mol_type = other DNA
cagtctgtgctgacgcagccgccctcagtgtctgcggccccaggacagaaggtcaccatctcctgctctggaagcagctccaacattgcgaataattttgtatcctggtaccagcagctcccaggaacagcccccaaactcctcatctatgagactaataagcgaccctcagggattcctgaccgattctctggctccaagtctggcacgtcagccaccctgggcatcaccggactccagactggggacgaggccgattattactgcgcaacatgggatagcagcctgagtgctgggcgggtggttttcggcggagggaccaagctgaccgtcctag

SEQ ID NO: 595 - DNA, 361 bp, synthetic construct
  misc_feature 1..361: note = Synthetic
  source 1..361: mol_type = other DNA
caggtccagctggtacagtctggggctgaggtgaagagtcctggggcctcagtgaaggtctcctgcaaggtttccggatacaccctcgttgaattaggcgtgcactgggtgcgacaggctcctggaaaggggcttgagtggatgggaggttttgatcctgaagatgctgaaatagtctacgcacagaagttccaggacagaatcatcatcaccgaggacacatctacagacatggcctacatggagctgagaagcctgagatctgaagacacggccatttattactgtgcagcaagttcccccttgagtggggactggctcgacccctggggccagggaaccctggtcaccgtctcctcag

SEQ ID NO: 596 - DNA, 331 bp, synthetic construct
  misc_feature 1..331: note = Synthetic
  source 1..331: mol_type = other DNA
cagtctgtgctgactcagccgccctccgtgtctgcggccccaggacagaaggtcaccatctcctgctctggaggcagctccaacgttgggaataattctgtgtcctggtaccagcagctcccaggaacaacccccaaactcctcatctatgaaactgataagcgaccctcagggattcctgaccgattctctggctccaagtctggcacgtcagccaccctggacatcaccggactccagactggggacgaggccgattattactgcggaacatgggatagcagcctgagtgctggggtgttcggcggagggaccaagctgaccgtcctag

SEQ ID NO: 597 - DNA, 376 bp, synthetic construct
  misc_feature 1..376: note = Synthetic
  source 1..376: mol_type = other DNA
caggtgcagctgcaggagtcggggccacgactggtgaagccttcggggaccctgtccctcacctgcgctgtctctggtggttccgtcagcaatagtcactggtggagttgggtccgccagtcccccggaaaggggttggagtggattggggaagtctttcatagtgggaacaataactgcaacccctccctgcagagtcgagtcaccctttcagtagacaagtctaagaaccagttctccctgaggatgagctctgtgaccgccgcggacacggccgtttattactgtgcgaggcggagggctgatggtagtcttacacttccgcatgatgctcttgatatctggggccaagggacaatggtcaccgtctcttcag

SEQ ID NO: 598 - DNA, 331 bp, synthetic construct
  misc_feature 1..331: note = Synthetic
  source 1..331: mol_type = other DNA
cagtctgccctgactcagcctgcctccgtgtctgggtctcctggacagtcgatcaccatctcctgcactggaaccagcagtgatgttgggagttataaccttgtctcctggtaccaacagcacccaggcaaagcccccaaagtcatcatttatgaggccactaagcggccctcaggggtttctaatcgcttctctggctccaggtctggcaacacggcctccctgacaatctctgggctccaggctgaggacgaggctgattatcactgcttctcatacgcaggttttagttcctgggtgttcggcggagggaccacactgaccgtcctag

SEQ ID NO: 599 - DNA, 373 bp, synthetic construct
  misc_feature 1..373: note = Synthetic
  source 1..373: mol_type = other DNA
caggtccagctggtacagtctggggctgaggtgaagaagcctggggcctcagtgaaggtctcctgcaaggtttccggatacaccctcgttgaattatccatccactggctgcgacaggctcctggaaaagggcttgagtggatgggaggttttgatcctgaagatactaaaacaatctacgcccagaagttccagggcagagtcaccatgaccgaggacacatctacagacacagcctatatggaggtgagcagcctgagatctgaggacacggccgtatatttctgtgcagcgacctccgccctccgccccctgattgaaaccagctggttcgacccctggggccagggaaccctggtcaccgtctcctcag

SEQ ID NO: 600 - DNA, 333 bp, synthetic construct
  misc_feature 1..333: note = Synthetic
  source 1..333: mol_type = other DNA
cagtctgtgctgacgcagccgccctcagtgtctgcggccccaggacagaaggtcaccatctcctgctctggaagcacctccaacattgggagtaattttgtggcctggtaccagcacctcccaggagcagcccccaaactcctcatctatgaaaataataagcgaccctcagggattcctgaccgattctctggctccaagtctggcacgtcagccaccctgggcatcaccggactccagactggggacgagggcgattattactgcggaacatgggatagcggcctgagtggcggaggggtgttcggcggagggaccaagctgaccgtccta

SEQ ID NO: 601 - DNA, 367 bp, synthetic construct
  misc_feature 1..367: note = Synthetic
  source 1..367: mol_type = other DNA
caggtccagctggtacagtctggggctgaggtgaagaaacctggggcctcagtgaaggtctcctgcaaggtttccggatacaccctcatagagttagccatccactgggtgcgacaggctcctggaaaaggacttgagtggatgggaggttttgatgctgaagacgctgaaacaatctacgcacagaagttccagggcagagtcaccatgaccgaggacacatctaaagacacagcctacatggagctgagcagcctgagatctgaggacacggccgtgtattactgtacaacaggtcccgcgtatggtagtggctggttccccccatggtactggggccagggaaccctggtcaccgtctcctcag

SEQ ID NO: 602 - DNA, 334 bp, synthetic construct
  misc_feature 1..334: note = Synthetic
  source 1..334: mol_type = other DNA
cagtctgtgctgactcagccgccctcagtgtctgcggccccaggacagaaggtcaccatctcctgctctggaaccagctccaacattgggaataattatgtatcctggtaccagcagttcccgggaacagcccccaaactcctcatctatgaaaatgataagcgaccctccgggattcctgaccgattctctgcctccaagtctggcacgtcagccaccctgggcatctccggactccagtctggggacgaggccgattattactgcggcacatgggacaggagcctgggtgctggaggggtgttcggcggagggaccaagctgaccgtcctag

SEQ ID NO: 603 - DNA, 355 bp, synthetic construct
  misc_feature 1..355: note = Synthetic
  source 1..355: mol_type = other DNA
caggttcagctggtgcagtctggagctgaggtgaagaagcctggggcctcagtgaaggtctcctgcaaggcttctggttacacctttaccaactttggtatctgctgggtgcgacaggcccctggacaagggcttgagtggatggggtggatcaactctaacaatggtgacacaatctatgcacagaagttccagggcagagtcaccatgaccgcagactcatccacgaacacagcctacatggcgctgacgagtctgagatctgacgacacggccgtatatttttgtgcgagagttgccgactacggtgagctggactcctggggccagggacccctggtcaccgtctcctcag

SEQ ID NO: 604 - DNA, 326 bp, synthetic construct
  misc_feature 1..326: note = Synthetic
  source 1..326: mol_type = other DNA
tcctatgagctgactcagccaccctcggtgtcagtgtccccaggacagacggccaggatcacctgctctggagatgcattgccaaagcaatatgcttattggtaccaacagaagccaggccaggcccctgtgttgcttatttataaagacactgagaggccctcagggatccctgaacgattctctggctccggctccgggacaacagtcacgttgaccatcagtggagtccaggcagaagacgaggctgactattactgtcaatcagcagacaacagtgattcccctaattgggtgttcggcggagggaccaagctgaccgtcct

SEQ ID NO: 605 - DNA, 390 bp, synthetic construct
  misc_feature 1..390: note = Synthetic
  source 1..390: mol_type = other DNA
caggtgcagctggtgcagtctggggctgaggtgaagaagcctgggtcctcggtgaaggtctcctgcaagacttctggagtcatcttcagcagaaatgcttttagttgggtgcgacaggcccccggacaaggccttgagtggatgggaaggatcatccctttccttgatgtaacaaattccgcacaggagttccagggcagagtcacacttaacgcggacaaatccacgagcacagtctacatggagttgagcagcctgagatctgaggacacggccatttattattgtgcgagacacaatggcgacccctacgatttttggagtggttacaatacttgggctgggggtttggacgtctggggccaagggaccacggtcaccgtctcctca

SEQ ID NO: 606 - DNA, 331 bp, synthetic construct
  misc_feature 1..331: note = Synthetic
  source 1..331: mol_type = other DNA
cagtctgtgctgactcagccaccctcagcgtctgggacccccgggcagagggtcactatctcttgttctggaagcggctccaacatcggaagtaatgctgtaaactggtaccagcagctcccaggaacggcccccaaactcctcatctataatcaaaatcaacggccctcaggggtccctgaccgattctctggctccaagtctggcacctcagcctccctggccatcggtgggctccagtcggaggatgaggctgactattactgtgcaacatgggatgacaatctgagtggtctggtattcggcggagggaccaagctgaccgtcctag

SEQ ID NO: 607 - DNA, 384 bp, synthetic construct
  misc_feature 1..384: note = Synthetic
  source 1..384: mol_type = other DNA
caggtccagctggtacagtctggggctgaggtgaagaagcctggggcctcagtgaaggtctcctgcaaggtttccgaatacaccctcactgaattgtccgtgcactgggtgcgacaggctcctggaaaaggacttgagtggatgggaggttttgatcctgaagatgctgaaactatctacgcacagaagttccagggcagagtcaccatgaccgaggacacatctacagacacagcctacatggagctgagcagcctgggatctgaggacacggccgtgtattactgtgcaactgccactgcgttgcagtggctggatggggcctaccactaccactacggtatggacgtctggggccaagggaccacggtcaccgtctcctca

SEQ ID NO: 608 - DNA, 337 bp, synthetic construct
  misc_feature 1..337: note = Synthetic
  source 1..337: mol_type = other DNA
gatattgtgatgacccagactccactctcttcacctgtcacccttggacagccggcctccatctcctgcaggtctagtcaaagcctcgtacacagtgatggaaacacctatttgagttggcttcagcagaggccaggccagcctccaagactcctaatttataagatttctaaccgggtctctggggtcccagacagattcagtggcagtggggcagggacagatttcacactgaaaatcagcagggtggaagctgaggatgtcggggtttattactgcatgcaagctacacaattcccgtgcacttttggccaggggaccaagctggagatcaaac

SEQ ID NO: 609 - DNA, 384 bp, synthetic construct
  misc_feature 1..384: note = Synthetic
  source 1..384: mol_type = other DNA
caggtccagctggtacagtctggggctgaggtgaagaagcctggggcctcagtgaaggtctcctgcaaggtttccggatacaccctcactgaattatccatgcactgggtgcgacaggctcctggaaaagggcttgagtggatgggaggttttgatcctgaagctgctgaaacagtctacgcacagaaattccagggcagagtcaccatgaccgaggacacacttacagacatagcctacatggagctgagcagcctgagatctgaggacacggccgtctattactgtgcagcgggccccgcaataactggaacccctacccagtactcctacttctacggtttggacgtctggggccgagggaccacggtcaccgtctcctca

SEQ ID NO: 610 - DNA, 329 bp, synthetic construct
  misc_feature 1..329: note = Synthetic
  source 1..329: mol_type = other DNA
caggctgtggtgactcaggagccatcgttctcagtgtcccctggagggacagtcacactcacttgtggcttgagctctggctcagtctctgctagaaactaccccagttggtaccagcagaccccaggccaggctccacgcacgctcatctacaacacagacactcgctcttctggggtccctactcgcttctctggctccgtccttgggaacaaagctgccctcaccatcacgggggcccagacagatgacgaatctgattattactgtatgctgtatatgggtagtggtcttcgggtgttcggcggagggaccaaactgaccgtcct

SEQ ID NO: 611 - DNA, 384 bp, synthetic construct
  misc_feature 1..384: note = Synthetic
  source 1..384: mol_type = other DNA
caggtccagctggtacagtctggggctgaggtgaagaagcctggggcctcagtgaaggtctcctgcaaggtttccggatacaccctcactgaattatccatccactgggtgcggcaggctcctggaaaagggcttgagtggatgggaggttttgatcctgaagatgctgaaacaatctacgcacagaagttccagggcagagtcaccatgaccgaggacacatctacagacacagcctacatggacctgagcagcctgagagctgaggacacggccgtgtattattgttcagcaggggtggcagtgactggcacgccggaaaattactcctactattacggtatggacgtctggggccaagggaccacggtcaccgtctcctca

SEQ ID NO: 612 - DNA, 322 bp, synthetic construct
  misc_feature 1..322: note = Synthetic
  source 1..322: mol_type = other DNA
gaaatagtgatgacgcagtctccagccaccctgtctgtgtctccaggggaaagagccaccctctcctgcagggccagtcagagtgttagcagcaacttagcctggtaccagcagaaacctggccaggctcccaggctcctcatctatggtgcatccaccagggccactggtatcccagccaggttcagtggcagtgggtctgggacagagttcactctcaccatcagcagcctgcagtctgaagattttgcagtttattactgtcagcagtataatgactggccccgggggttcggccaagggaccaaggtggagatcaaac

SEQ ID NO: 613 - DNA, 384 bp, synthetic construct
  misc_feature 1..384: note = Synthetic
  source 1..384: mol_type = other DNA
caggtccagctggtacagtctggggctgaggtgaagaagcctggggcctcagtgaaggtctcctgcaaggtttccggatacaccctcactgaattatccatacactgggtgcgacaggctcctggaaaagggcttgagtggatgggaggttttgatcctgaacatgctgagacaatctacgcacagaagttcaagggcagagtcaccatgaccgaggacacatcttcagacacggcctacatggacctgagcaacctcagatctgaggacacggccctatattactgtgcaacagccttcgcaattcgagggacttccgacagttaccactactactacggtatggacgtctggggccaagggaccacggtcaccgtctcctca

SEQ ID NO: 614 - DNA, 336 bp, synthetic construct
  misc_feature 1..336: note = Synthetic
  source 1..336: mol_type = other DNA
gatattgtgatgacccagacgccactctcctcacctgtcacccttggacagccggcctccatctcctgcaggtctagtcaaagcctcgtacacagtgatggaaacacttacttgagttggcttcagcagaggccaggccagcctccaagactcctaatttatatgatttctaaccggttctctggggtcccagacaggttcagtggcagtggggcagggacagatttcacactgaaaatcagcagggtggaagctgaggatgtcgggctttattactgcatgcaaactacacaatttccgtacacttttggccaggggaccaagctggagatcaaa

SEQ ID NO: 615 - DNA, 373 bp, synthetic construct
  misc_feature 1..373: note = Synthetic
  source 1..373: mol_type = other DNA
caggtgcagctgcaggagtcgggccccggactggtgaagccttcacagaccctgtccctcacctgcactgtctctggtggctccattggcagtggtggttactggagttggatccgccagcacccagggacgggcctagagtggattgggtacatctattatactgggagcacctactacaacccgtcgttcaagagtcgacttagcatatccgtggacacgtctaacaaccagttctccctgaagctgagctctgtgactgccgcggacacggccgtgtattactgtgcgagagatcgtcctttctttggttcggaaagtcctcatgcttttgatatctggggccaagggacaatggtcaccgtctcttcag

SEQ ID NO: 616 - DNA, 319 bp, synthetic construct
  misc_feature 1..319: note = Synthetic
  source 1..319: mol_type = other DNA
gacatccagatgacccagtctccttccaccctgtctgcatctgtaggagacagagtcaccatcacttgccgggccagtcagagtattagtagttggttggcctggtatcagcagaaaccagggaaggcccctaaactcctgatctataaggcgtctactttagaaggtggggtcccatcaaggttcagcggcagtggatctgggacagaattcactctcaccatcagcagcctgcagtctgatgattttgcaacttattactgccaacagtataatagttaccggacgttcggccaagggaccaaggtggaaatcaaac

SEQ ID NO: 617 - DNA, 387 bp, synthetic construct
  misc_feature 1..387: note = Synthetic
  source 1..387: mol_type = other DNA
caggtgcagctggtggagtctgggggaggcgtggtccagcctgggaggtccctgagactctcctgtgcagcctctggattcagcttcagaagttatggcatgcactgggtccgccaggccccaggcaaggggctggagtgggtggcagtcatatcatatgatggaagtgaagaatatcatgcagactccgtgaagggccgattcgccatctccagagacaattccaagaacacgctgtctctgcaaatgagcagcctgagacctgaggacacggctgtatattactgtgcgaaagatcagggggatgaagatagcagtggctggttacggccccatattaccttcgctatggacgtctggggccaagggaccacggtcaccgtctcc

SEQ ID NO: 618 - DNA, 322 bp, synthetic construct
  misc_feature 1..322: note = Synthetic
  source 1..322: mol_type = other DNA
gacatccagatgacccagtctccatcctccctgtctgcatctgttggagacagagtcaccatcacttgccgggcaagtcagggcattagaaatgatttagcctggtatcagcagaaaccagggaaagcccctaagcgcctgatctatgctgcatccagtttgcaaagtggggtcccatcaaggttcagcggcagtggatctgggacagaattcactctcacaatcagcagcctgcagccggaagattttgcaacttattactgtcttcagtataatagttatcctcccactttcggccctgggaccaaagtggatatcaaac

SEQ ID NO: 619 - DNA, 390 bp, synthetic construct
  misc_feature 1..390: note = Synthetic
  source 1..390: mol_type = other DNA
caggtgcagctggtggagtctgggggaggcgtggtccagcctgggaggtccctgagactctcctgtgcagcctctggattcaccttcagtagctctattatatactgggtccgccaggctccaggcaaggggctggagtgggtggctgttgtatcccttgatggaagcaatgagtattatgctgactccgtgaagagccgattcaccgtctccagcgattattccaagaacactctgtatctgcaaatgaacggcctgagagctgaggacacgggtgtatattactgcgcgagagatcgcgtggatagcagcacctggtacacggtcggatactactactacaacggtatggacgtctggggccaggggaccacggtcaccgtctcctca

SEQ ID NO: 620 - DNA, 322 bp, synthetic construct
  misc_feature 1..322: note = Synthetic
  source 1..322: mol_type = other DNA
gacatccagttgacccagtctccatccttcctgtcttcatctgtaggagacagagtcaccatcacttgccgggccagtcaggacattagtagtcatttagcctggtatcagcaaagaccagggaaagcccctaagctcctgatctatgctgcatccactttgcaaagtggggtcccatcaaggttcagcggcagtgaatctgggacagaattcactctcacaatcagcagcctgcagcctgaagattttgcaacttatttctgtcaacagcttaatacttaccccctcactttcggcggagggaccaaggtggagatcaaac

SEQ ID NO: 621 - DNA, 381 bp, synthetic construct
  misc_feature 1..381: note = Synthetic
  source 1..381: mol_type = other DNA
caggtgcagctggtggagtccgggggaggcctggtcaagccgggggggtccctgagactctcctgtgcagcctctggattcaccttcagtagttataatatgaactgggtccgccaggctccagggaaggggctggagtgggtctcactcattagtagtagtggtcgtttcatatactacgctgactcagtgaagggccgattcaccatctccagagacaacgccaagaactcactatttctgcaaatgaacagcctgagagccgaggacacggctgtatattattgtgcgagagacctcccggcggaacgatttttggagtggttattgtcatacggcatggacgtctggggccaagggaccacggtcaccgtctcctca

SEQ ID NO: 622 - DNA, 328 bp, synthetic construct
  misc_feature 1..328: note = Synthetic
  source 1..328: mol_type = other DNA
cagtctgccctgactcagcctccctccgcgtccgggtctcctggacagtcagtcaccatctcctgcactggaaccagcagtgacattggtggttataactatgtctcctggtaccaacagcacccaggcaaagcccccaaactcatgatttatgaggtcactaagcggccctcaggggtccctgatcgcttctctggctccaagtctggcaacacggcctccctgaccgtctctgggctccaggctgaggatgaggctgattattactgcagctcatatgcaggcaacagcaaaatattcggcggagggaccaagctgaccgtcctag

SEQ ID NO: 623 - DNA, 377 bp, synthetic construct
  misc_feature 1..377: note = Synthetic
  source 1..377: mol_type = other DNA
caggtgcagctggtggagtctgggggaggcctcgtcaagcctggggggtccctgagactctcctgtgcagcctctggatttaccttcagtagttatagcatgaactgggtccgccaggctccagggaagggactggagtgggtctcatccattagtagtagtagtaatttcatatactacgcagactcagtgaagggccgattcaccatctccagagacaacgccaagaactcagtatatctgcaaatgaacagcctgagagccgaggacacggctgtgtattactgtgcgagggagtggaattactatgatagtagaggttattactacggggaatatgactactggggccagggaaccctggtcaccgtctcctc

SEQ ID NO: 624 - DNA, 325 bp, synthetic construct
  misc_feature 1..325: note = Synthetic
  source 1..325: mol_type = other DNA
gaaattgtgttgacgcagtctccaggcaccctgtctttgtctccaggggaaagagccaccctctcctgcagggccagtcagagtgttagcagcagtaacttagcctggtaccagctgaaacctggccaggctcccaggctcctcatctctggtgcatccagcagggccactggcatcccagacaggttcagtggcagtgggtctgggacagacttcactctcaccatcagcagactggagcctgaagattttgcagtgtattactgtcagcagtatggtagctcacctcggacgttcggccaagggaccaaggtggaaatcaaac

SEQ ID NO: 625 - DNA, 378 bp, synthetic construct
  misc_feature 1..378: note = Synthetic
  source 1..378: mol_type = other DNA
gaggtgcagctggtggagtctgggggaggcttggtacagcctggagggtccctgagagtctcttgtgtagcctctggattcagcttccgtaattatgaaatgaactgggtccgccaggctccagggaaggggctggagtggatttcatatattagtagtagtgataatatcacatactacgcagactctgtgaagggccgattcaccatctccagagacaacgccaaaaattcactttatctgcaaatgaacagcctgagagccgaggacacggctgtttattactgtgcgagagagccccccataacgatttttggagtggtttttccgtgctgtatggacgtctggggccaagggaccacggtcaccgtctcctca

SEQ ID NO: 626 - DNA, 344 bp, synthetic construct
  misc_feature 1..344: note = Synthetic
  source 1..344: mol_type = other DNA
cagcctgtgctgactcagccgtcttccctctctgcatctcctggagcatcagccagtctcacctgcacctttcgcagtggcatcaatgttggtacctacaggatatactggtaccagcagaagccagggagtcctccccagtttcttctcaggtacaactcagactcagattatcagcggggctctgcagtccccagtcgcttctctggatccaaagatgcttcggccaatgcagggattttactcatctctgggctccattctgaggatgacgctgactattactgtatgatttggcacggcagcgcttgggtgttcggcggagggaccaagctgaccgtcct

SEQ ID NO: 627 - DNA, 364 bp, synthetic construct
  misc_feature 1..364: note = Synthetic
  source 1..364: mol_type = other DNA
caggtccagctggtacagtctggggctgaggtgaagaggcctggggcctcagtgaaggtctcctgcaaggtttccggatacaccctcgttgaattatccattcactgggtgcgacaggctcctggaaaagggcttgagtggatgggaggttttgatcctgaggacggtgaaactatctatgcacagaagttccagggcagagtcaccatgaccgaggacacatctacagacacagcctacatgcagctgagcagcctgagatctgaggacacggccatttattactgtactacaactacacctaaggggcatccggggtggctcgacccctggggccagggaaccctggtcaccgtctcctcag

SEQ ID NO: 628 - DNA, 331 bp, synthetic construct
  misc_feature 1..331: note = Synthetic
  source 1..331: mol_type = other DNA
cagtctgccctgactcagcctgcctccgtgtctgggtctcctggacagtcgatcaccatctcctgcactggaaccagcagtgatgttgggagttataaccttgtctcctggtaccaacagcacccaggcaaagcccccaaactcatgatttatgaagacaataagcggccctcaggggtttctagtcgcttctctggctccaagtctggctacacggcctccctgacaatctctgggctccaggctgaggacgaggctgattattactgctgttcatatgcaggtagtggcacgagcgtcttcggaactgggaccgaggtcaccgtcctag

SEQ ID NO: 629 - DNA, 364 bp, synthetic construct
  misc_feature 1..364: note = Synthetic
  source 1..364: mol_type = other DNA
caggtccagctggtacagtctggggctgaggtgaagaagcctggggcctcagtgaaggtctcctgcaaggtttccggatacaccctccctgaagtttccatacactgggtgcgacaggctcctggaaaggggcttgagtggatgggaggttttcatcctgaaaatgttgaaacaatctactcacagaagttccagggcagagtcaccatgaccgaggacacatctacggacacagcctacatggaactgagcagcctgatatgtgacgacacgggcgtgtattactgtgcactagccccagtcctaagactagggggctggttcgacccctggggacagggaaccctggtcaccgtctcctcag

SEQ ID NO: 630 - DNA, 331 bp, synthetic construct
  misc_feature 1..331: note = Synthetic
  source 1..331: mol_type = other DNA
cagtctgccctgactcagcctgcctccgtgtctgggtctcctggacagtcgatcaccatctcctgcactggaaccgacagtgacgttggtcgttataactatgtctcctggtaccaacaacacccaggcaaagcccccaaactcatgatttatgaggtcactaatcggccctcaggggtttctaatcgcttctctgcctccaagtctggcaacacggcctccctgagcatctctgggctccaggctgaggacgagggtgattattactgcagctcatatacaggcagcacctcctgggtgttcggcggagggaccaggctgaccgtcctag

SEQ ID NO: 631 - DNA, 384 bp, synthetic construct
  misc_feature 1..384: note = Synthetic
  source 1..384: mol_type = other DNA
gaagtgcagctggtggagtctgggggaggcttggtacagcctggcaggtccctgagactctcctgtgcagcctctggattcacgtttgatgattatgccatgcactgggtccggcaagttccagggaagggcctggagtgggtctcaggtattagttggaatagtgataatataggctatgcggactctgtgaagggccgattcaccatctccagagacaacgccaagaagtccctgtatctgcaaatgaacagtctgagagctgaggacacggccttgtattactgtgcaaaagattgggccccgcggtattactatgatattagtggttatcaaaacactatggacgtctggggccaagggaccacggtcaccgtctcctca

SEQ ID NO: 632 - DNA, 325 bp, synthetic construct
  misc_feature 1..325: note = Synthetic
  source 1..325: mol_type = other DNA
tcctatgagctgactcagccaccctcggtgtcagtggccccaggaaagacggccaggattacctgtgggggaaacaacattggaagtaaaagtgtgcactggtatcagcagaagccaggccaggcccctgtgctggtcgtcaatgatgatagcgaccggccctcagggatccctgagcgagtctctggctccaactctgggaacacggccaccctgaccatcagcagggtcgaagccggggatgaggccgactattactgtcaggtgtgggatagtagtagtgatcatgtggtattcggcggagggaccaagctgaccgtcctag

SEQ ID NO: 633 - DNA, 346 bp, synthetic construct
  misc_feature 1..346: note = Synthetic
  source 1..346: mol_type = other DNA
caggtgcagctgcaggagtcgggcccaggactggtgaagccttcggggaccctgtccctcacctgcgctgtctctggtggctccatcagcagcagtaactggtggagttgggtccgccagcccccagggaaggggctggagtggattggggaaatctatcatagtgggagcaccaactacaacccgtccctcaagagtcgagtcaccatgtcactagacaagtccaagaaccagttctccctgaagctgaactctgtgaccgccgcggacacggccgtgtattactgtgcgagaggctggtactttgactactggggccagggaaccctggtcaccgtctcctcag

SEQ ID NO: 634 - DNA, 331 bp, synthetic construct
  misc_feature 1..331: note = Synthetic
  source 1..331: mol_type = other DNA
cagtctgccctgactcagcctgcctccgtgtctgcgtctcctggacagtcgatcaccatctcctgcactggaaccagcagtgatgttgggagttataaccttgtctcctggtaccaacaacacccaggcaaagcccccaaactcatgatttatgagggcagtaagcggccctcaggggtttctaatcgcttctctggctccaagtctggcaacacggcctccctgacaatctctgggctccaggctgaggacgaggctgattattactgcttctcatatgcaggtagtagcacttgggtgttcggcggagggaccaagctgaccgtcctag

SEQ ID NO: 635 - DNA, 373 bp, synthetic construct
  misc_feature 1..373: note = Synthetic
  source 1..373: mol_type = other DNA
caggtgcagctacagcagtggggcgcaggactgttgaagccttcggagaccctgtccctctcctgcgctgtctctggtgggtccttcagtggttactactggagctggatccgccagcccccagggaaggggctggagtggattggggaaatcagtcatagtggaaactttaactacaacccgtccttcaagagtcgagtcaccctatcagtagacacgtccaagaaccagttctccctgaacctgaggtctgtgaccgccgcggacacggctatgtattactgtgcgagaggctttcagccccttgacaagctgccgacatgggactactttgactactggggccagggaaccctggtcaccgtctcctcag

SEQ ID NO: 636 - DNA, 322 bp, synthetic construct
  misc_feature 1..322: note = Synthetic
  source 1..322: mol_type = other DNA
gaaatagtgatgacgcagtctccagccaccctgtctgtgtctctaggggaaagagccaccctctcctgcagggccagtcagagtgttagcagcaacttagcctggtaccagcagaaacctggccaggctcccaggctcctcatctttggtgcatccaccagggccactggtatcccagccaggttcagtggcagtgggtctgggacagagttcactctcaccatcagcagcctgcagtctgaagatcttgcagttttttactgtcagcagtataataactggccccggacgttcggccaagggaccaaggtggaaatcaaac

SEQ ID NO: 637 - DNA, 376 bp, synthetic construct
  misc_feature 1..376: note = Synthetic
  source 1..376: mol_type = other DNA
caggtgcagctggtggagtctgggggaggcctggtcaagccgggagggtccctgagactctcctgtgcagcctctggattcaccttcagtcattctatcatgaattgggtccgccaggctccagggaaggggctggagtgggtctcatccattagtagtactagtagtttcatatattatgtggactcagtgaagggccgattcaccatctccagagacaacgccaagaattcactgtatctgcaaatgaacagcctgagacccgaggacacggctgtgtattactgtgcgagaaccccaaatctgagaagtgactactggaacgagcactatcttgaccactggggccagggaaccctggtcaccgtctcctcag

SEQ ID NO: 638 - DNA, 325 bp, synthetic construct
  misc_feature 1..325: note = Synthetic
  source 1..325: mol_type = other DNA
gaaatagtgatgacgcagtctccagccaccctgtctgtgtctccaggggaaagagccaccctctcctgcagggccagtcagagtgttagcagcaacttagcctggtaccagcagaaacctggccaggctcccaggctcctcatctatggtgcatctaccagggccactggtatcccagacaggttcagtgggagtgggtctgggacagagttcactctcaccatcagcagcctgcagtctgaagatgttgcagtttattactgtcagcagtgttataactggcctccgtggacgttcggccaagggaccaaggtggaaatcaaac

SEQ ID NO: 639 - DNA, 375 bp, synthetic construct
  misc_feature 1..375: note = Synthetic
  source 1..375: mol_type = other DNA
caggtgcagctggtggagtctgggggaggtgtggtccagcctgggaggtccctgagactctcctgtgcagcctctggattcaccttcagtagttatggcatgcactgggtccgccaggctccaggcaaggggctggagtgggtggcagttgtaccatttcatggaagtgatcaacactatgcagactccgtgaagggccgattcaccgtctccagagacaactccaagaacatattctatctgcagatgaacagcctgagaactgaggacacggctgtgtattactgtgcgaaagatcgggaaagtacgatgactaactttaaagtggggggtttggacgtctggggccaagggaccacggtcaccgtctcctca

SEQ ID NO: 640 - DNA, 319 bp, synthetic construct
  misc_feature 1..319: note = Synthetic
  source 1..319: mol_type = other DNA
tcctatgagctgacacagccaccctcagtgtccgtgtccccaggacagacagccaacatcacctgctctggagatgaattgggggataaatatgtttgctggtatcagcagaagccaggccagtcccctgtgatggtcatttttttagatgacaagcggccctcagggatccctgagcgattctctggctccaactctgggaacacagccactctgaccatcagcgggacccaggctatggatgaggctgactattactgtcaggcgtgggacagcagcactttggtattcggcggagggaccaagctgaccgtcctag

SEQ ID NO: 641 - DNA, 361 bp, synthetic construct
  misc_feature 1..361: note = Synthetic
  source 1..361: mol_type = other DNA
caggtccagctggtacagtctggggctgaggtgaagaagcctggggcctcagtgaaggtctcctgcaaggtttccggatacaccctccctgaaatatccatacactgggtccgagaggctcccggaaaagggctcgagtggatgggaggttttgatcctgaagatggtgaaacaatctactcacagaggttccagggcagagtcaccatgaccgaggacacatctacagacacagcctacatggagctgagcagtctgagatctgaggacacggccgtctattactgtgcagcatccagtccattctccgggggctggttccacccctggggccagggaaccctggtcaccgtctcctcag

SEQ ID NO: 642 - DNA, 325 bp, synthetic construct
  misc_feature 1..325: note = Synthetic
  source 1..325: mol_type = other DNA
cagtctgccctgactcagcctgcctccgtgtctgggtctcctggacagtcgatcaccatctcctgcactgaaaccagcagtgatgttgggaattataaccttgtctcctggtaccaacaacacccaggcaaagcccccaaactcgtgatttatgagggcactaagcggccctcaggggtttctaatcgcttctctgcctccaagtctggcaacaccgcctccctgacaatctctgagctccaggctgaggacgaggctaattattactgctgctcatatgcacgtagtggggtattcggcggagggaccaagctgaccgtcctag

SEQ ID NO: 643 - DNA, 384 bp, synthetic construct
  misc_feature 1..384: note = Synthetic
  source 1..384: mol_type = other DNA
caggtgcagctggtgcagtctggggctgaggtgaagaagcctggggcctcagtgaaggtctcctgcaaggcttctggatacaccttcaccggctactctatgcactgggtgcgacaggcccctggacaaggccttgagtggatgggatggatcaacccaaacaatggtgacacaacttatgcacagaagtttcagggcagggtcaccatgaccagggacacatctgtcagcacagcctacatggagctgaacagactgagatctgacgacacggccgtctattactgtgcgggcctgaacagtggggattactatgatgatcctggttattccaaggggggtatggacgtctggggccaagggaccacggtcaccgtctcctca

SEQ ID NO: 644 - DNA, 328 bp, synthetic construct
  misc_feature 1..328: note = Synthetic
  source 1..328: mol_type = other DNA
tcctatgagctgactcagccaccctcggtgtcagtgtccccaggacaaacggccaggatcacctgctctggagatgcattgccaaaaagatatgcttattggtaccagcagaagtcaggccaggcccctgtgctggtcatctatgaggacagcaaacgaccctccgggatccctgagagattctctggctccagctcagggacaatggccaccttgactatcagtggggcccaggtggaggatgaagctgactaccactgttattcaacagacaccagtgataatcatagaggggtattcggcggagggaccaagctgaccgtcctag

SEQ ID NO: 645 - DNA, 381 bp, synthetic construct
  misc_feature 1..381: note = Synthetic
  source 1..381: mol_type = other DNA
caggtgcagctggtgcagtctggggctgaggtgaagaagcctgggccctcggtgaaggtctcctgcaaggcttctggaggcaccttcagcagctctgctatcagctggatacgacaggcccctggacaagggcttgagtggatggggaggatcatccctatgctcaataaagcaaactacgcacagaagttccagggcagagtcacgattagcgcggacgagtccacgggcacagcctacatggagttgaggagcctgagatctgaggacacggccgtgtattactgtgcgagagatcggggggtttacgataggggaaactacttctactattacggtatggacgtctggggccaagggaccacggtcaccgtctcctca

SEQ ID NO: 646 - DNA, 337 bp, synthetic construct
  misc_feature 1..337: note = Synthetic
  source 1..337: mol_type = other DNA
gatattgtgatgactcagtctccactctccctgcccgtcacccctggagagccggcctccatctcctgcaggtctagtcagagtctcctgcataataatggatacaagtatttggattggtacctgcagaagccagggcagtctccacagctcctgatctatttgggttctaatcgggcctccggggtccctgacaggttcagtggcagtggatcaggcacagattttacactgaaaatcagcagagtggaggctgaggatgttggggtttattattgcatgcaagctctacaaagtccgcacacttttggccaggggaccaagctggagatcaaac

SEQ ID NO: 647 - DNA, 381 bp, synthetic construct
  misc_feature 1..381: note = Synthetic
  source 1..381: mol_type = other DNA
caggtccagctggtacagtctggggctgaggtgaggaagcctggggcctcagtgaaggtctcctgcaaggtttccggatacaccctcactgaattatccatgcactgggtgcgacagtctcctggaaaagggcttgagtggatgggaagttttgatcctgacgatggtgaaacattctacgcacagaagttccagggcagaatcaccatgagcgaggacacatctacggacacagcctacatggagctgagcagcctgagatctgaggacacggccgtgtatttctgtgcaacagatagtaatatgatagtagtccgaggaaactactactacagcggtctggacgtctggggccaagggaccacggtcaccgtctcctca

SEQ ID NO: 648 - DNA, 322 bp, synthetic construct
  misc_feature 1..322: note = Synthetic
  source 1..322: mol_type = other DNA
gaaatagtgatgacgcagtctccagccaccctgtctgtgtctccaggggagagagccaccctctcctgcagggccagtcagagtgttgccggcaacttggcctggtaccagcagaaacctggcctggctcccaggctcctcatccaaggtccatccaccagggccactggtatcccagccagattcagtggcagtgggtctgggacagagttcactctcaccatcagcagcctgcagtctgaagattttgcagtttattactgtcaccagtataataactggccctggacgttcggccaagggaccaaggtggaaatcaaac

SEQ ID NO: 649 - DNA, 384 bp, synthetic construct
  misc_feature 1..384: note = Synthetic
  source 1..384: mol_type = other DNA
caggtccagctggtacagtctggggctgaggtgaagaagcctggggcctcagtgaaggtctcctgcaaggtttccggatacaccctcactgaattatccatacactgggtgcgacaggctcctggaaaagggcttgagtggatggggggttttgatcctgaaggtcctgaaacaatctacgcacagaagttccagggcagagtcaccatgaccgaggacacatctacagacacagcctacatggaggtgagcagcctgacatctgaagacacggccgtgtattactgtgcaaccgctttcgccatactagggactaacgaaaagtcacactattactacggtgtggacgtctggggccaagggaccacggtcaccgtctcctca

SEQ ID NO: 650 - DNA, 337 bp, synthetic construct
  misc_feature 1..337: note = Synthetic
  source 1..337: mol_type = other DNA
gatattgtgatgacccagactccactctcctcacctgtcacccttggacagccggcctccatctcctgcaggtctagtcaaagcctcgtacacagtgatggaaacacctacttgagttggcttcagcagaggccaggccagcctccaagactcctaatttataagatttctaaccgagtctctggggtcccagacagattcagtggcagtggggcagggacagacttcacactgaaaatcagcagggtggaagctgaggatgtcggggtttattactgcatgcaagttacacaatttccatacacttttggccaggggaccaagctggagatcaaac

SEQ ID NO: 651 - DNA, 370 bp, synthetic construct
  misc_feature 1..370: note = Synthetic
  source 1..370: mol_type = other DNA
caggtccagctggtacagtctggggctgaggtgaagaagcctggggcctcagtgaaggtctcctgcaaggtttccgaatacaccctcattgaattatccatgcactgggtgcgacaggctcctggaaaacggcttgagtggatgggaggttttgatcctgaagatgttaaaacagtctacgcacagaagttccagggcagagtcaccatgaccgaggacacatctacagacacagcctacatggaactgagcagcctgagatctgaggacacggccgtatattactgtgcagctgtcccggctctttggcgtggtcattactccctcccgacgcactggggccagggaaccctggtcaccgtctcctcag

SEQ ID NO: 652 - DNA, 325 bp, synthetic construct
  misc_feature 1..325: note = Synthetic
  source 1..325: mol_type = other DNA
gaaattgtgttgacgcagtctccaggcaccctgtctttgtctccaggagaaagagccaccctctcctgcaggaccagtcagagtgttagcagcagctacttagcctggtaccagcagaaacctggccaggctcccaggctcctcatctatggtgcatccagcagggccactggcatcccagacaggttcagtggcagtgggtctgggacagacttcactctcaccatcagcagactggagcctgaagattttgcaatgtactactgtctccagtatggtaggtcactctacacttttggccaggggaccaagctggagatcaaac

SEQ ID NO: 653 - DNA, 382 bp, synthetic construct
  misc_feature 1..382: note = Synthetic
  source 1..382: mol_type = other DNA
caggtgcagctggtggagtctgggggaggcgtggtccagcctgggaagtccctgagactctcctgtgcagcctctggattcaccttcagtgggtctgacatgcactgggtccgccaggccccaggcaaggggctggagtgggtggcagttatatcatctgatggaagtaatacatactatagagactccgtgaagggccgcttcaccatctccagagacaattccaagaacaccctgtatctacaaatgatcagcctgagaactgaggacacggctgtgtattactgtgcgaaagatggggcctcatatgataatactggtcattactccgctgaatacttccagcactggggccagggcgccctggtcaccgtctcctcag

SEQ ID NO: 654 - DNA, 325 bp, synthetic construct
  misc_feature 1..325: note = Synthetic
  source 1..325: mol_type = other DNA
tcctatgagctgactcagccaccctcggtgtcagtgtccccaggacagacggccaggatcacctgttctggagatgcattgccaaaacaatatgcttgttggtaccagcagaagccaggccaggcccctgtagtggtaatatataaagacactgagaggccctcagggatccctgcgcgattctctggctccagttcagggacaacagtcacgttgaccatcagtggagtccaggcagaagatgaggctgactattactgtcaatcagccgacagcagtggtccttatgtgatattcggcggagggaccaagctgaccgtcctag

SEQ ID NO: 655 - DNA, 364 bp, synthetic construct
  misc_feature 1..364: note = Synthetic
  source 1..364: mol_type = other DNA
gaggtgcagctggtggagtctgggggagacttggtacagcctggggggtccctgagactctcctgtgcagcctctggattcacctttagtctctatagcatgaactgggtccgccaggctccagggaaggggctggagtggatttcatccattactagtggtagtactggcatatactacgcagactctgtgaggggccgattcaccatctccagagacaatgccaagaactcactgtatctgcaaatgagcagcctgagagacgaggacacggctgtgtattattgtgcgagagatgaaggtggatacaactatggaatatctgactactggggccagggaaccctggtcaccgtctcctcag

SEQ ID NO: 656 - DNA, 325 bp, synthetic construct
  misc_feature 1..325: note = Synthetic
  source 1..325: mol_type = other DNA
gacatccagatgacccagtctccatcctccctgtctgcatctgtaggagacagagtcaccatcacttgccgggcaagtcagggcattagaaatgatttaggctggtatcagcagaaaccagggaaagcccctaagcgcctgatctatgctgcatccagtttgcaaagtggggtcccatcaaggttcagcggcagtggatctgggacagaattcactctcacaatcagcagcctgcagcctgaagattttgcaacttattactgtctacagtataatagttaccccaggagcactttcggccctgggaccaaagtggatatcaaac

SEQ ID NO: 657 - DNA, 370 bp, synthetic construct
  misc_feature 1..370: note = Synthetic
  source 1..370: mol_type = other DNA
gaggtgcagctggtggagtctgggggaggcttggtccagcctggggggtccctgagactctcctgtgcagcctctggattcacctttagtagctattggatgagctgggtccgccaggctccagggaaggggctggagtgggtggccaacataaagcaagatggaagtgagaaatactatgtggactctgtgaagggccgattcaccatctccagagacaacgccaagaactcactgtatctgcaaatgaacagcctgagagccgaggacacggctgtgtattactgtgcgagagattctcagatggctagcaggtggccctatggttttgatatctggggccaagggacaatggtcaccgtctcttcag

SEQ ID NO: 658 - DNA, 316 bp, synthetic construct
  misc_feature 1..316: note = Synthetic
  source 1..316: mol_type = other DNA
gaaattgtgttgacgcagtctccaggcaccctgtctttgtctccaggggaaagagccaccctctcctgcagggccagtcagagtgttagcagcagctacttagcctggtaccagctgaaacctggccaggctcccaggctcctcatctatggtgcatccagcagggccactggcatcccagacaggttcagtggcagtgggtctgggacagacttcactctcaccatcagcagactggagcctgaagattttgcagtgtattactgtcagcagtatggtagctcactcggcggagggaccaaggtggagatcaaac

SEQ ID NO: 659 - DNA, 370 bp, synthetic construct
  misc_feature 1..370: note = Synthetic
  source 1..370: mol_type = other DNA
caggtgcagctggtggagtctgggggaggcgtggtccagccgggggggtccctgagactctcctgtgcagcgtctggattcaccttcagcctctacggcatgcactgggtccgccaggctccaggcaaggggctggagtgggtggcatttataaattatgatggaactaataaatactatgcagactccgtgaagggccgattcaccatctccagagacaattccaagaacacgttgtatctggtaatggacagcctgagagctgaggacacggctgtgtattactgtgcgacgtcccttagaggatcttgcattaatggtgtatgctgggcctactggggccagagaaccctggtcaccgtctcctcag

SEQ ID NO: 660 - DNA, 331 bp, synthetic construct
  misc_feature 1..331: note = Synthetic
  source 1..331: mol_type = other DNA
cagactgtggtgacccaggagccctcactgactgtgtccccaggagggacagtcactctcacctgtgcttccagcactggagcagtcaccagtggttactatccaaactggttccagcagaaacctggacaagcacccagggcactgatttatagtacaaacaacaaacactcctggacccctgcccggttctcaggctccctccttgggggcaaagctgccctgacactgtcacgtgtgcagcctgaggacgaggctgagtattactgcctgctctactatggtggtgctcattgggtgttcggcggagggaccaagctgaccgtcctag

SEQ ID NO: 661 - DNA, 382 bp, synthetic construct
  misc_feature 1..382: note = Synthetic
  source 1..382: mol_type = other DNA
gaggtgcagctggtggagtctgggggaggcttggtacagcctggagggtccctgagactctcctgtgcagcctctggattcacctttagtatttatgaaatgaactgggtccgccaggctccagggaaggggctggagtgggtttcatatattactactagtggtagtaccagatataacgcggactctgtgaagggccgattcaccatctccagagacaacgccaagaactcactatatctgcacatgaacagcctgagagccggggacacggctgtttattactgtgcgagaccccaatatcattactatgatactagtgcttatcactcgtatggttttgatatctggggccaagggacaatggtcaccgtctcttcag

SEQ ID NO: 662 - DNA, 334 bp, synthetic construct
  misc_feature 1..334: note = Synthetic
  source 1..334: mol_type = other DNA
cagcttgtgctgactcaatcgccctctgcctctgcctccctgggagcctcggtcaagctcacctgcactctgagcagtgggcacagcagctacgccatcgcatggcatcagcagcagccagagaagggccctcggtacttgatgacgcttaacagtgatggcagccacagtaagggggacgggatccctgatcgtttctcaggctccagctctggggctgagcgctacctcaccatctccagcctccagtctgacgatgaggctgactattattgtcagacctgggacactggcattcgagtgttcggcggagggaccaagctgaccgtcctag

SEQ ID NO: 663 - DNA, 373 bp, synthetic construct
  misc_feature 1..373: note = Synthetic
  source 1..373: mol_type = other DNA
caggtgcagctggtgcagtctggggctgaagtgcagaagcctgggtcctcagtgaagatctcctgcaagacttctggaggcaccttcagcaactctgctatcaactgggtgcgacaggcccctggacaagggcttgagtggatggcaaggatcatccccattcttgctacatcaacctccgcacaaaagtttcagggcagagtctcgattaccgcggacagatccacgagcacagtctacatggaagtgagcagtctcacatctgacgacacggccgtctattattgtgcgatagatagggcggggcggcagctggaacgatttgcctggttcgacccctggggccagggatccctggtcaccgtctcctcag

SEQ ID NO: 664 - DNA, 331 bp, synthetic construct
  misc_feature 1..331: note = Synthetic
  source 1..331: mol_type = other DNA
cagtctgccctgactcagcctgcctccgtgtctgggtctcctggacagtcgatcaccatctcctgcagtggaaccagcagtgatattgggagttataacgttgtctcctggtaccaacagcacccggacaaagcccccaaagtcgtgatttatgagggcattaagcgaccctcagggatttctagtcgtttctctgcctccaggtctggcagcacggcctccctgacaatctctgggctccaggctgaggacgaggctgattattactgctgctcatatgtagggagcagtacttgggtgttcggcggagggaccaaggtgaccgtcctag

SEQ ID NO: 665 - DNA, 373 bp, synthetic construct
  misc_feature 1..373: note = Synthetic
  source 1..373: mol_type = other DNA
caggtgcagctggtggagtctgggggaggcgtggtccagcctgggaggtccctgagaatctcctgtgcagcgtctgggttcaccttcagtaactatggcatgcactgggtacgccaggctccaggcaagggactggagtgggtgacatttatctggtatgatggaagtaataaatactatgcagactccgtgaagggccgattcaccatttccagagacaatttcaagaacacgctgtatctgcaaatgaacagcctgagagccgaggacacggctgtgtattactgtgcgagagatcgtactgatagcagctcgtttttggcagggtactttgactactggggccagggaaccctggtcaccgtctcctcag

SEQ ID NO: 666 - DNA, 325 bp, synthetic construct
  misc_feature 1..325: note = Synthetic
  source 1..325: mol_type = other DNA
tcctatgagctgactcagccaccctcggtgtcagtgtccccaggacaaacggccaggatcacctgctctggagatgcattgccaaaaaaatatgcttattggtaccagcagaagtcaggccaggcccctgtgctggtcatctatgaggacagcaaacgcccctccgggatccctgagacattctctgggtccagctcagggacaatggccaccttgactatcagtggggcccaggtggaggatgaggctgactactattgttactcaacacacagcagtgatgatctttgggtgttcggcggagggaccaagctgaccgtcctag

SEQ ID NO: 667 - DNA, 358 bp, synthetic construct
  misc_feature 1..358: note = Synthetic
  source 1..358: mol_type = other DNA
caggtgcagctacagcagtggggcgcaggactgttgaagccttcggagaccctctccctcacctgcgatgtctatggtgggtcccccagtggttactactggagctggatccgccagcccccagggaagggactggagtggattggggaaatcactcatactggaaacaccaactacaatccgtccctcaagagtcgagtcgccatatctatagacacgtccaagaaccagttctccctgaagttgaattctgtgaccgccgcggacacggctgtatattactgtgcgagaggcctctggatcctagggtgtcggttcgacccctggggccagggaaccctggtcaccgtctcctcag

SEQ ID NO: 668 - DNA, 322 bp, synthetic construct
  misc_feature 1..322: note = Synthetic
  source 1..322: mol_type = other DNA
gacatccagatgacccagtctccatcctccctgtctgcgtctgtaggagacagagtcaccatcacttgccgggcaagtcagggctttagcaactatttaaattggtatcagcaaaacccagggaaagcccctaagctcctgatctatggtgcatcccgtttggaaagtggggtcccatcaaggttcagtggcagtggatctgggacagatttcactctcaccatcagcagtctgcaacctgaagattttgcaacttattactgtcaacagagttacagtaccccgtacacttttggccaggggaccaagctggagatcaaac

SEQ ID NO: 669 - DNA, 375 bp, synthetic construct
  misc_feature 1..375: note = Synthetic
  source 1..375: mol_type = other DNA
caggtgcagctggtggagtctgggggaggcgtggtccagcctgggaagtccctgagactctcctgtgaagcatctggattcaccttcagaaattatggcatgcactgggtccgccaggctccaggcaaggggctggagtgggtggcatttatatggtatgatggcactgataaatactatgcagactccgtgaagggccgatccaccatctccagagacaattccaagaatacgttgtatctggaaatgaacagcctgagagccgaggacacggctgtatattactgtgcgagagattttggctttgtggtggtcgtacctgactacgacggtttggacgtctggggccaagggaccacggtcaccgtctcctca

SEQ ID NO: 670 - DNA, 331 bp, synthetic construct
  misc_feature 1..331: note = Synthetic
  source 1..331: mol_type = other DNA
cagtctgtgctgacgcagccaccctcagcgtctgctacccccgggcagagggtccccatctcttgttctggaggcacctccaatatcggaagccattctgtatactggtaccagcacctcccaggaacggcccccaagctcctcatctataggaatgatcagcggccctcaggggtccctgaccgattctctggctccaagtctggcacctcagcctccctggccatcagcgggctccggtccgaggatgaggctgattactactgtgcagcatgggatgacagcctcagtggttgggtgttcggcggagggaccaggctgaccgtcctag

SEQ ID NO: 671 - DNA, 384 bp, synthetic construct
  misc_feature 1..384: note = Synthetic
  source 1..384: mol_type = other DNA
caggtccagctggtacagtctggggctgaggtgaagaagcctggggcctcagtgaaggtctcctgtaaggtttccgattacaccctcactgaattatccatgcactgggtgcgacaggctcctggaaaagggcttgagtggatggggggttttgatcctgaggaggctgaaacaatctacgcccagaagttccagggcagagtcaccatgaccgaggacacatctacagacacagcctacatggagctgagcagcctgagatctgaggacacggccgtgtatttctgtgcagcagccccggctgtttttggagtgattacctcttactacttctactacggtttggacgtctggggccaagggaccacggtcaccgtctcctca

SEQ ID NO: 672 - DNA, 340 bp, synthetic construct
  misc_feature 1..340: note = Synthetic
  source 1..340: mol_type = other DNA
cagtctgtgctgactcagccgccctcagtgtctgcgtccccaggacagaaggtcaccatctcctgctctggaagcagctccaactttgcgaataataatgtatcctggtaccagcagctcccaggaacagcccccaaacttctcatctatgaaaataataaacgtccctcagggattcttgaccgattctctggctccaagtctgccacgtcagccaccctgggcatcaccggactccagactggggacgaggccgattattactgcggaacatgggataccagcctgagtgcccgggggaattgggtgttcggcggggggaccaagctgaccgtcctag

SEQ ID NO: 673 - DNA, 346 bp, synthetic construct
  misc_feature 1..346: note = Synthetic
  source 1..346: mol_type = other DNA
caggtgcagctgcaggagtcgggcccaggactagtgaagccttcggggaccctgtccctcacttgcgctgtctctggtggctccatcagtagtaataattggtggagttggatccgccagcccccagggaaggggctggagtggattggagaaatctatcatagtgggaacaccaactacaacccgtccctcaagagtcgagtcacaatgtcagtagacaagtccgagaaccaattctccctgaggctgaactctgtgaccgccgcggacacggccgtatattattgtgcgagaggctggtactacgactactggggccagggaacgctggtcaccgtctcctcag

SEQ ID NO: 674 - DNA, 331 bp, synthetic construct
  misc_feature 1..331: note = Synthetic
  source 1..331: mol_type = other DNA
cagtctgccctgactcagcctgcctccgtgtctgggtcccctggacagtcgatcaccatctcctgcactggaaccagcagtgatgttgggagttataatcttgtctcctggtaccaacagcacccaggcaaagctcccaaactcatgatttatgagggcaataagcggccctcaggggtttctaatcgcttctctggctccaagtccggcaacacggcctctttgacaatctctgggctccaggctgaggacgaggctgaatatttctgctactcatatgcaggtagtagcacctgggtgttcggcggcgggaccaagctgaccgtcctag

SEQ ID NO: 675 - DNA, 393 bp, synthetic construct
  misc_feature 1..393: note = Synthetic
  source 1..393: mol_type = other DNA
gaggtgcagctgttggagtctgggggaggcttggtacagcctggggggtccctgagactctcctgtacagcctctggattcatttttagtcgttatgccatgacctgggtccgccaggctccagggaaggggctggagtgggtctcaggtattagcgctagcggtggtggcacataccacgcagattccgtgaagggccggttcagcatctccagagacaattccaagaacaccctgtatctgcaaatgaacagcctgagagccgaggacacggccgtatattactgtgcgaaagttcaagattacgatttttggagtggttaccccgataggggccactactactatggtatggacgtctggggccaagggaccacggtcaccgtctcctca

SEQ ID NO: 676 - DNA, 337 bp, synthetic construct
  misc_feature 1..337: note = Synthetic
  source 1..337: mol_type = other DNA
gatattgtgatgacccagactccactctctctgtccgtcacccctggacagccggcctccatctcctgcaagtctagtcagagcctcctgtatagtgatggaaagacctatttgtattggtacctgcagaagccaggccagtctccacagctcctaatctctgaggtttccagccggttctctggagtgccagataggttcagtggcagcgggtcagggacagatttcacactgaaaatcagtcgggtggaggctgaggatgttggcgtttattactgcatgcaacctatacaccttccgtggacgttcggccaagggaccaaggtggagatcaaac

SEQ ID NO: 677 - DNA, 367 bp, synthetic construct
  misc_feature 1..367: note = Synthetic
  source 1..367: mol_type = other DNA
gaggtgcagctggtggagtctgggggaggcttggtccagcctggggggtccctgagactctcctgttcagcctctggtttcaccttcagtagttaccctatgcactgggtccgccaggctccagggaagggactggagtttgtttcagccattagtagtaatggggacagaaaacactacgcagactccgtggagggcagattcaccatctccagagacaattccaagaacacgctgtatcttcaaatgagcagtctgagagctgaggacacggctatatattattgtgtaaaagtgcaatatgggcaattctggttcagtgactttgactactggggccagggaagcctggtcaccgtctcctcag

SEQ ID NO: 678 - DNA, 328 bp, synthetic construct
  misc_feature 1..328: note = Synthetic
  source 1..328: mol_type = other DNA
gaaattgtgttgacacagtctccagccgccctgtctttgtctccaggggaaagagccaccctctcctgcagggccagtcagagtgtaagtatctacctagcctggtaccaacagaaacctggccaggctcccaggctcctcatctatgatgcagccaacagggccactggcatcccagccaggttcagtggcagtgggtctgggacagacttcactctcaccatcagcagcctagagcccgaagattttgcggtttattactgtcagcaacgtggcagctggcctccgctgtacacttttggccaggggaccaagctggagatcaaac

SEQ ID NO: 679 - DNA, 370 bp, synthetic construct
  misc_feature 1..370: note = Synthetic
  source 1..370: mol_type = other DNA
caggtgcagctgcaggagtctggctcagggctggtgaagccttcacagaccctgtccctcacgtgcgctgtctctggtggctccatcagcagtggtggtctctcctggagctggatccggcagccaccagggaaggacctggagtggattgggttcatctatcatagtgggagcacctactacaacccgtccctcaagagtcgagtcaccatgtcagtagacaggtcgaagaaccagttctccctgaggctgaattctgtgaccgccgcggacacggccgtatattattgtgccagagaggcgggtagtactgggtggtcggtctggttcgacccctggggccagggaaccctggtcaccgtctcctcag

SEQ ID NO: 680 - DNA, 340 bp, synthetic construct
  misc_feature 1..340: note = Synthetic
  source 1..340: mol_type = other DNA
cagtctgtgctgacgcagccgccctcagtgtctgcggccccagggcagagggtcaccatctcctgcactgggagcagctccaacatcggggcaggtaatgatgtacactggtaccagcagtttccaggaacagcccccaaactcctcatctatgctaacaccaatcggccctcaggggtccctgaccgattctctggctccaagtctggcacctcagcctccctggccatcactgggctccagtctgaagatgaggctgattattactgccagtcctatgacagcagtctgactggtccctctcatgtcttcggaactgggaccaaggtcaccgtcctag

SEQ ID NO: 681 - DNA, 364 bp, synthetic construct
  misc_feature 1..364: note = Synthetic
  source 1..364: mol_type = other DNA
caggtccagctggtacagtctggggctgaggtgaagaagcctggggcctcagtgaaggtctcctgcaaggtttccggatacaccctcattgagttatccatgcactgggtgcgacaggctcctggaatagggcttgagtggatgggaggttttgatgctgaagatgctaaaacaatctacgcacagaagttccagggcagagtcaccatgaccgaggacacatcgacagacacagcctatatggaggtgagcagcctgagatctgaggacacggccgtgtattactgtgcaaccctttatgctataactggaactggacctctgtggttctggggccagggaaccctggtcaccgtctcctcag

SEQ ID NO: 682 - DNA, 322 bp, synthetic construct
  misc_feature 1..322: note = Synthetic
  source 1..322: mol_type = other DNA
gacatccagttgacccagtctccatccttcctgtctgcatctgtaggagacagagtctccgtcacttgccgggccagtcagggcattagcagttatttagcctggtatcagcaaaaaccaggaaaagcccctaagttcctgatctatgctgcatccactttacaaagtggggtcccatcacggttcagcggcagcggatctgggacagaattcactctcacaatcagcagcctgcagcctgaagattttgcaacttattactgtcaacagcttaatagttacccgctcactttcggcggagggaccaaggtggagatcaaac

SEQ ID NO: 683 - DNA, 363 bp, synthetic construct
  misc_feature 1..363: note = Synthetic
  source 1..363: mol_type = other DNA
caggtgcagctgcaggagtcgggcccaggactggtgaagccttcggagaccctgtccctcacctgcactgtctctggtggctccatcagtacttcctactggagctggatccggcagcccccagggaagggcctggagtggattggatatatctcttacagtgggaccaccaactacaacccctccctgaagagtcgagtcaccatagacacgtccaagaaccagttctccctgaacctgagctccgtgaccgctgcggacacggccgtgtattactgtgcgagaagcgatggggaggggccttatccctactactacggtttcgacgtctggggccaagggaccacggtcaccgtctcctca

SEQ ID NO: 684 - DNA, 325 bp, synthetic construct
  misc_feature 1..325: note = Synthetic
  source 1..325: mol_type = other DNA
tcctatgagctgacacagccaccctcggtgtcagtgtccccaggacagacggccaggatcacctgctctggagatgcattgccaaaggaatatgcttattggtaccagcagaagccaggccaggcccctgtattggtgatatataaagacagtgagaggcccgtagggatccctgagcgattctccggctccagctcagggacaacagtcacgttgaccatcagtggagtccaggcagaagacgagtctgactattactgtcaatcagcagacaccagtggtacttccgtggtattcggcggagggaccaagctgaccgtcctag

SEQ ID NO: 685 - DNA, 358 bp, synthetic construct
  misc_feature 1..358: note = Synthetic
  source 1..358: mol_type = other DNA
gaggtgcagctggtggagtctgggggaggcttggtacagcctggggggtccctgagactctcctgtgcagcctctggattcaccttcagtacctacgacatgcactgggtccgccaacctacaggaaaaggtctggagtgggtctcaaccattgatactgttggtgacacatactattcaggctccgtgaagggccgattcaccatctccagagaaaatgccaagaactccttgtatcttcaaatgaacagcctgagacccggggacacggctgtgtattactgtgcaagggtctacggtgactacgatttgtacttcgatctctggggccgtggcaccctggtcaccgtctcctcag

SEQ ID NO: 686 - DNA, 322 bp, synthetic construct
  misc_feature 1..322: note = Synthetic
  source 1..322: mol_type = other DNA
gacatccagatgacccagtctccatcttccgtgtctgcatctgtaggagacagagtcaccatcacttgtcgggcgagtcagggtattagcagctggttaggctggtatcagcagaaaccagggaaagcccctaagctcctgatctatgctgcatccagtttgcaaagtggggtcccgtcaaggttcagcggcagtggatctgggacagaattcactctcaccatcagcagcctgcagcctgaagattttgcaacttactattgtcaacagggtcacactttccctccggatttcggcggagggaccaaggtggagatcaaac

SEQ ID NO: 687 - DNA, 364 bp, synthetic construct
  misc_feature 1..364: note = Synthetic
  source 1..364: mol_type = other DNA
caggtgcagctgcaggagtcgggcccaggcctggtgaagccttcacagaccctgtccctcacctgcactgtctctggtggctccgtcaccagtggtgattactactggacctggatccgccagcacccagggaagggcctggagtggattggctacatctttcacagtgggagcacctactacaacccgtccctcgagagtcgagtcaccctattcgtagacgcgtctaagaaccagttctccctgaagctgaactctgtgactgccgcggacacggccgtttattattgtgcgagaacaacgacccgggtagtttggtacttcgatctctggggccgtggcaccctggtcaccgtctcctcag

SEQ ID NO: 688 - DNA, 328 bp, synthetic construct
  misc_feature 1..328: note = Synthetic
  source 1..328: mol_type = other DNA
cagtctgccctgactcagcctcgctcagtgtccgagtctcctggacagtcagtcaccatctcctgcactggaaccaacagtgctgttggtggttataactatgtctcctggtatcaacagcacccaggcaaagcccccaaactcatgatttatgatgtcaataagcggccctcaggggtccctgctcgcttctctggctccaagtctggcaacacggcctccctgaccatctctgggctccagactgaggatgaggctgattattactgctcctcatatgcaggcagttcttgggtgttcggcggagggaccaaactgaccgtcctag

SEQ ID NO: 689 - DNA, 364 bp, synthetic construct
  misc_feature 1..364: note = Synthetic
  source 1..364: mol_type = other DNA
caggtgcagctgcaggagtcgggcccaggactggtgaagccttcacagaccctgtccctcacgtgcactgtctctggtggctccatcagcagcggtggtaactattggagctggatccgccagcacccagggaagggcctggagtggattgggtacatctatcacactgggagcacctaccacaacccgtccctcgagactcgagtcaccatatcagtcgacacgtctaagaaccagttttccctgaaggtgaactctgtgactgccgcggacacggccttatattactgtgcgcgagcagtaattcggggaacatggtacttcgatctctggggccgtggcaccctggtcaccgtctcctcag

SEQ ID NO: 690 - DNA, 325 bp, synthetic construct
  misc_feature 1..325: note = Synthetic
  source 1..325: mol_type = other DNA
cagtctgccctgactcagcctgcctccgtgtctgggtctcctggacagtcgatcaccatctcctgcactagaaccaacagtgacgttggtggttttaactatgtctcatggtaccaacaccacccaggcaaagcccccaaactcatgatttttgatgtcaataatcgcccctcaggaatttctaatcgcttctctggctccaagtctggcaacacggcctccctgaccatctctgggctccaggctgaggacgaggctgattattactgcagctcatatacaaccacctgggtgttcggcggagggaccaagctgaccgtcctag

SEQ ID NO: 691 - DNA, 375 bp, synthetic construct
  misc_feature 1..375: note = Synthetic
  source 1..375: mol_type = other DNA
caggtgcagctggtggagtctgggggaggcctggtcaagccgggggggtccctgagactctcctgtgcagcctctagattcaacttcagtagctacagtatgaactgggtccgccaggctccagggaaggggctggagtgggtctcgtccattagtagtagtagtaatttcatatactacgcaaactcagtgaagggccgattcaccatctccagagacaacgccaagaactcactgtatctgcaaatgaacagcctgagagccgaggacacggctgtgtattactgtgcgagagatcccgtgtatagcaacagctggttctactactactacatagacgtctggggcaaagggaccacggtcaccgtctcctca

SEQ ID NO: 692 - DNA, 334 bp, synthetic construct
  misc_feature 1..334: note = Synthetic
  source 1..334: mol_type = other DNA
cagtctgccctgactcagcctgcctccgtgtctgggtctcctggacagtcgatcaccatctcctgcactggaaccagcagtgatgttgggacttataaccttgtctcctggtaccaacaacacccaggcaaagcccccaaactcatgatttatgaggtcagtaagcggccctcaggggtttctaatcgcttctctggctccaagtctggcaacacggcctccctgacaatctctgggctccaggctgaggacgaggctgattattactgctgctcatatgcaggtagtagcaccccttatgtcttcggatctgggaccaaggtcaccgtcctag

SEQ ID NO: 693 - DNA, 379 bp, synthetic construct
  misc_feature 1..379: note = Synthetic
  source 1..379: mol_type = other DNA
caggtgcagctgcaggagtcgggcccaggactggtgaagccttcacagaccctgtccctcacctgcactgtctctggtacttccatcaacagtggtgattactactggagttggatccgccagcccccagggaaaggcctggagtggattgggtatatttattatactgggagcacctactacaacccgtcactcaagagtcgacctaccatatcactagacacttccaagaaccagttctccctgaagctgaactctgtgactgccgcagataccgccgtgtacttctgtgccagagagacgagatcacctctctaccgggaactcaatgggtggttcgacccctggggccagggaaacctggtcaccgtctcctcag

SEQ ID NO: 694 - DNA, 335 bp, synthetic construct
  misc_feature 1..335: note = Synthetic
  source 1..335: mol_type = other DNA
gacatcgtgatgacccagtctccagactccctggctgtctctctgggcgagagggccaccatcagctgcaagtccagccagagtattttgtacagctccaacaataagaactacttagcttggtatcagcataaactaggacaacctcctaaactgctcatttactgggcatctacccgggaatccggggtccctgaccgattcagtgggagcgggtctgggacagatttcactctcaccatcgccaacctgcagcctgaagatgtggcagtttattactgtcagcaatattatagtattcggacgttcggccaagggaccaaggtggagatcaa

SEQ ID NO: 695 - DNA, 376 bp, synthetic construct
  misc_feature 1..376: note = Synthetic
  source 1..376: mol_type = other DNA
caggtccagctggtacagtctggggctgaggtgaagaagcctggggcctcagtgaaggtctcctgcaaggtttccggatacaccctccctgaattatccatgcactgggtgcgacaggctcctggaaaagggcttgagtggatgggaggttttgatcctgaacatggtgaaacagtctacgcacagaagttccagggcagagtcagcatgaccgaggacacatctacggacacagcctacatggagctgagcagcctgagatctgaggacacggccgtatattactgtgtaacgtcgtcaccacatctgcttcagggagtcccccgcaactggttcgacccctggggccagggaaccctggtcaccgtctcctcag

SEQ ID NO: 696 - DNA, 331 bp, synthetic construct
  misc_feature 1..331: note = Synthetic
  source 1..331: mol_type = other DNA
cagtctgtgctgactcagccgccctcagtgtctgcggccccaggacagaaggtcaccatcccctgctctggaagcagctccaacattgggaataattatgtatcctggtaccagcagctcccaggaacagcccccaaactcctcatctatgaaaataataagcgaccctcagggattcctgaccgattctctggctccaagtctggcacgtcagccaccctgggcatcaccggactccagactggggacgaggccgattattactgcggaacatgggatagcagcctgagtgctgtggtattcggcggagggaccaagctgaccgtcctag

SEQ ID NO: 697 - DNA, 376 bp, synthetic construct
  misc_feature 1..376: note = Synthetic
  source 1..376: mol_type = other DNA
caggtgcagctggtggagtctgggggaggcgtggtccagcctgggaggtccctgagactctcctgtgcagcctcaggattcaccttcagtaactatggcatgcactgggtccgccaggctccaggcaaggggctggagtggctggcagctgtatcatatgacggaactaataaacactatggagactccatgaagggccgattcaccatctccagagacaataccaagaacacgctgtatctgcagatgaacagcctggcagctgaggacacggctgtatattactgtgcgaaataccattacagtggctggtaccgatacggaactggctattttgatgtctggggccaagggacaatggtcaccgtctcttcag

SEQ ID NO: 698 - DNA, 322 bp, synthetic construct
  misc_feature 1..322: note = Synthetic
  source 1..322: mol_type = other DNA
gacatccagatgacccagtctccctccaccctgtctgcatctgtaggagacagagtcatcatcacttgccgggccagtcagagtattagtgactggttggcctggtatcagcagaaaccaggcaaagcccctaagctcctgatctataaggcgtctaatttagaaagtggggtcccatcaaggttcagcggcagtggatctgggacagaattcactctcaccatcagcagcctgcagcctgatgactttgcaatttattactgccaacagtataatagttatccgtacacttttggccaggggaccaagctggagatcaaac

SEQ ID NO: 699 - DNA, 376 bp, synthetic construct
  misc_feature 1..376: note = Synthetic
  source 1..376: mol_type = other DNA
caggtgcagctggtggagtctggggggggcgtagtccagcctgggaggtccctgagactctcctgtgcagcctctggattcgccttcagtaagtatggtatgcactgggtccgccaggctccaggcaagggcctggattgggtggcacttatatcatatgatggcagcagtaacttctacgcggactccgtgaagggccgattcaccgtctccagagacaattccaggaatacgctctatgttcaaatgaatagcctgagaactgaggacacggctgtgtatttctgtgcgacagagtctgcgccaggcttagtggggcctactacgtggcacttccagcactggggccagggcaccctggtcaccgtctcctcag

SEQ ID NO: 700 - DNA, 313 bp, synthetic construct
  misc_feature 1..313: note = Synthetic
  source 1..313: mol_type = other DNA
gaaattgtgttgacgcagtctccaggcaccctgtcattgtctccaggggaaagagccaccctctcgtgtagggccagtcagagtattagtagcagctccttagcctggtaccagcagatacctggccaggctcccaggctcatcatctctggtgcatccaacagggccactggcatcccagacaggttcagtggcagtgggtctgggacagacttcactctcaccatcagcagactggagcctgaagattgtgcaatatattactgtcagtttacgtggacgttcggccaagggaccaaggtggaaatcaaac

SEQ ID NO: 701 - DNA, 360 bp, synthetic construct
  misc_feature 1..360: note = Synthetic
  source 1..360: mol_type = other DNA
caggtccagctggtacagtctggggctgaggtgaagaagcctggagcctcagtgagggtctcctgcaaggtttccggatacaccctcattgaattatccatacactgggtgcgacaggctcctggaaaagggcttgaatggatgggaggttttgatcctgaagatgctaaaacaatctatgcacagaagttccagggcagagtcaccatgaccgaggacacatctacagacacagcctacatggagctgagaagcctgagatctgacgacacggccgtctattactgtgccacaggttcccccttgagaggggactggctcgacccctggggccagggaaccctggtcaccgtctcctca

SEQ ID NO: 702 - DNA, 331 bp, synthetic construct
  misc_feature 1..331: note = Synthetic
  source 1..331: mol_type = other DNA
cagtctgtgctgactcagccgccctcagtgtctgcggccccaggacagaaggtcaccatctcctgctctggaagcagctccgacattgggaataattatgtatcctggtaccagcaactcccaggaacagcccccaaactcctcatctatgaaaataataagcgaccctcagggattcctgaccgattctctggctccaagtctggcacgtcagccaccctgggcatcaccggactccagactggggacgaggccgattattactgcggaacatgggatagcagactgagaactggggtgttcggcggagggaccaagctgaccgtcctag

SEQ ID NO: 703 - DNA, 361 bp, synthetic construct
  misc_feature 1..361: note = Synthetic
  source 1..361: mol_type = other DNA
caggtccagctggtacagtctggggctgaggtgaagaggcctggggcctcagtgagggtctcctgcaaggtttccggatacaccctccctgaactatccatccactgggtgcgacaggctcctggaaaagggcttgagtgggtgggaggttttgatcctgaagatggtgacacaatctacgcacagaagttccagggcagagtcaccatgaccgaggacacatctacagacacagcctacatggagctgagcagcctgagagctgaggacacggccatgtattactgtgctgcggcgtcaccatttaacattcactggttcgacccctggggccagggaaccctggtcaccgtctcctcag

SEQ ID NO: 704 - DNA, 334 bp, synthetic construct
  misc_feature 1..334: note = Synthetic
  source 1..334: mol_type = other DNA
cagtctgtgctgactcagccgccctcagtgtctgcggccccaggacagaaggtcaccatctcctgctctggaagcagctccaacattgggaataattatgtatcctggtaccagcagctcccaggaacagcccccaaactcttcatctatgaaaataataagcgaccctcagggattcctgaccgattctctggctccaagtctggcacgtcagccaccctgggcatcaccggactccagactggggacgaggccgtttattactgcggaacgtgggatcgaagcctgagtgtccattatatcttcggagctgggacccaggtcaacgtcctag

SEQ ID NO: 705 - DNA, 378 bp, synthetic construct
  misc_feature 1..378: note = Synthetic
  source 1..378: mol_type = other DNA
caggtgcagctggtggagtctgggggaggcctggtcaagcctggggggtccctgagactctcctgtgcagcctctggattcaccttcagtagctatagcatgaactgggtccgccaggctccagggaaggggctggagtgggtctcatccattagtagtagtagtagttacatatactacgcagactcagtgaagggccgattcaccatctccagagacaacgccaagacctcactgtatctgcaaatgaacagcctgagagccgaggacgcggctgtatattactgtgcgagagaggacgaggtcgggccagggaattacttcttctactacggtatggacgtctggggccaagggaccacggtcaccgtctcctca

SEQ ID NO: 706 - DNA, 331 bp, synthetic construct
  misc_feature 1..331: note = Synthetic
  source 1..331: mol_type = other DNA
cagtctgtgctgactcagccaccctcagcgtctgggacccccgggcagagggtcaccatctcttgttctggaagcagctccaacatcggaaataattatgtatactggtaccagcaactcccaggaacggcccccaaactcctcatctataggaataatcagcggccctcaggggtccctgaccgattctctggcttcaagtctggcacctcagcctccctggccatcagtgggctccggtccgaggatgaggctgattattactgtgcagcctgggatgaccgcctgagtggtaaggtgttcggcggagggaccaagctgaccgtcctag

SEQ ID NO: 707 - DNA, 382 bp, synthetic construct
  misc_feature 1..382: note = Synthetic
  source 1..382: mol_type = other DNA
caggtgcagctgcaggagtcgggcccaggactggtgaagccttcggagaccctgtccctcacctgctctgtctctggtggctccatcagtacttattactggagttggatccggcagccccccgggaagggactggagtggattggatatatctattacagtgggagcaccaactacaacccctccctcaagagtcgagtcaccatatcagtagacgcgtccaagaaccagttctccctgaacctgagctctgtgaccgccgcagacacggccgtgtattactgtgcgagaggattagagttttggtattactatgatagtagtggtccccataggtggttcgacccctggggccagggaaccctggtcaccgtctcctcag

SEQ ID NO: 708 - DNA, 346 bp, synthetic construct
  misc_feature 1..346: note = Synthetic
  source 1..346: mol_type = other DNA
cagcctgtgctgactcagccgtcttccctctctgcatctcctggagcatcagccagtctcacctgcaccttgcgcagtggcatcaatgttggttcctatatgatatactggtaccagcagaggccagggagtcctccccagtatctcctgaggtacaaatcagactcagataagcagcagggctctggagtccccagccgcttctctggatccaaagatgcttcggccaatgcagggattttactcatctctgggctccagtctgaggatgaggctgactattactgtatgatttggcacagcagcgcttcggttttcggcggagggaccaagctgaccgtcctag

SEQ ID NO: 709 - DNA, 363 bp, synthetic construct
  misc_feature 1..363: note = Synthetic
  source 1..363: mol_type = other DNA
caggtgcagctggtggagtctgggggaggcttggtcaagcctagagggtccctgagactctcctgtgcagcctctggattcaccttcagtgactaccacatggggtggatccgccaggctccagggaaggggctggagtgggtttcatacattactagtagtagtactagttacacaaactacgcagactctgtgaagggccgattcaccatctccagagacaacgccaagaactcactgtatctgcaaatgaacagcctgagagccgaggacacggctgtgtattactgtgcgagagttcacggtgactacgactactacatggacgtctggggcaaagggaccacggtcaccgtctcctca

SEQ ID NO: 710 - DNA, 322 bp, synthetic construct
  misc_feature 1..322: note = Synthetic
  source 1..322: mol_type = other DNA
gacatccagatgacccagtctccttccaccctgtctgcatctgtaggagacagagtcaccatcacttgccgggccagtcagagtattagtagttggttggcctggtatcaacagaaaccagggaaagcccctaagctcctgatctataaggcgtctagtttagaaagtggggtcccatcaaggttcagcggcagtggatctgggacagaattcactctcaccatcagcagcctgcagcctgatgattttgcaacttattactgccaacagtataatagttattctctcactttcggcggagggaccaaggtggaaatcaaac

SEQ ID NO: 711 - DNA, 396 bp, synthetic construct
  misc_feature 1..396: note = Synthetic
  source 1..396: mol_type = other DNA
caggtgcagctggtggagtctgggggaggcgtggtccagcctgggaggtccctgagactctcctgtgcagcgtctggattcaccttcagtagctatggcatgcactgggtccgccaggctccaggcaaggggctggagtgggtggcagttatatggtatgatggaagtaataaatactatgcagactccgtgaagggccgattcaccatctccagagacaattccaacaacacgctgcatctgcaaatgaacagcctgagagccgaggacacggctgtgtattactgtgcgagagattcctgggaggttccccgagcgtattactatgatagttttgaataccaagggttggttcccgactactggggccagggaaccctggtcaccgtctcctca

SEQ ID NO: 712 - DNA, 322 bp, synthetic construct
  misc_feature 1..322: note = Synthetic
  source 1..322: mol_type = other DNA
gacatccagatgacccagtctccatcctccctgtctgcatctgtaggagacagagtcaccatcacttgccgggcaagccaggacattagaaatgatttaggctggtatcagcagaaaccagggcaagcccctaggctcatgatctatgctgcatccagtttagaaagtggggtcccatcaaggttcagcggcagtggatctggcacagatttcactctcaccatcagcagcctgcagcctgaagattttgcaacttattactgtctacaagattacaattaccctcggacttttggccaggggaccaagctggagatcaaac

SEQ ID NO: 713 - DNA, 381 bp, synthetic construct
  misc_feature 1..381: note = Synthetic
  source 1..381: mol_type = other DNA
caggtgcagctggtggagtctgggggaggcgtggtccagcctgggaggtccctgagactctcctgtgcagcgtctggattcaccttcagtagctctggcatgcactgggtccgccaggctccaggcaaggggctggagtgggtggcaggtatatggtatgatggaagtaataaatattacgcagactccgtggagggccgattcaccatctccagagacaattccaagaacacgctgtatctgcaaatgaacagcctgagagccgaggacacggctgtgtattactgtgcgagagatccaaccgaccactacgatttttggagtggttattactatggtatggatgtctggggccaagggaccacggtcaccgtctcctca

SEQ ID NO: 714 - DNA, 322 bp, synthetic construct
  misc_feature 1..322: note = Synthetic
  source 1..322: mol_type = other DNA
gaaattgtgttgacacagtctccagccaccctgtctttgtctccaggggaaagagccaccctctcctgcagggccagtcacagtgttagcagctacttagcctggtaccaacagaaacctggccaggctcccaggctcctcatctatgatgcatccaagagggccactggcatcccagccaggttcagtggcagtgggtctgggacaggcttcactctcaccatcagcagcctagaggctgaagattttgcagtttattactgtcagcagcgtagcaactggtcgtacacttttggccaggggaccaagctggagatcaaac

SEQ ID NO: 715 - DNA, 384 bp, synthetic construct
  misc_feature 1..384: note = Synthetic
  source 1..384: mol_type = other DNA
caggtgcagctggtgcagtctggggctgaggtgaagaagcctggggcctcagtgaaggtttcctgcaaggcatctggatacaccttcaccagttactatatacactgggtgcgacaggcccctggacaagggcttgagtggatgggaataatcaaccctagtggtggtagcacaaactacgcacagaagttccagggcagagtcaccatgactagggacacgtcgacgagcacagtctacatggaggtgagcagcctgagatctgaggacacggccgtgtattactgtgcgagagattttacggtgactacttcgactacctcgaccaactactactacggtatggacgtctggggccaagggaccacggtcaccgtctcctca

SEQ ID NO: 716 - DNA, 325 bp, synthetic construct
  misc_feature 1..325: note = Synthetic
  source 1..325: mol_type = other DNA
tcctatgagctgactcagccaccctcggtgtcagtgtccccaggacagacggccaggatcacctgctctggagatgcattgccaaagcaatatgcttattggtaccagcagaagccaggccaggcccctgtggtggtgatatataaagacagtgagaggccctcagggattcctgagcgattctctggctccagctcagggacaacagtcacggtgaccatcagtggagtccaggcagaagacgagggtgactattactgtcaatcagcagacagcagtggtagttatgtggtattcggcggagggaccaagctgaccgtcctag

SEQ ID NO: 717 - DNA, 384 bp, synthetic construct
  misc_feature 1..384: note = Synthetic
  source 1..384: mol_type = other DNA
caggtgcagctggtgcagtctggggctgaggtgaagaagcctgggtcctcggtgaaggtctcctgcaaggcttctggaggcaccttcatcaactatgctgtcacctgggtgcgacaggcccctggacaagggcttgagtggatgggagggatcatccctatccttggtataccaaactacgcacagaagttccagggcagagtcacgattaccgcggacaaatccacgagcacagcctacatggagctgagcagcctgagatctgaggacacggccgtgtattactgtgcgagagtcccgcaggcgggagcagctcagggtcattactactactactacggtatggacgtctggggccaagggaccacggtcaccgtctcctca

SEQ ID NO: 718 - DNA, 325 bp, synthetic construct
  misc_feature 1..325: note = Synthetic
  source 1..325: mol_type = other DNA
gaaattgtgttgacgcagtctccaggcaccctgtctttgtctccaggggaaagagccaccctctcctgcagggccagtcagagtgttaccagcagctacttagcctggtaccagcagaaacctggccaggctcccaggctcctcatctatggtgcatccagcagggttactggcatcccagacaggttcagtggcagtgggtctgggactgacttcactctcaccatcagcagactggagcctgaagattttgcagtgtattactgtcagcagtatggtagctcacccctcactttcggcggagggaccaaggtggaaatcaaac

SEQ ID NO: 719 - DNA, 373 bp, synthetic construct
  misc_feature 1..373: note = Synthetic
  source 1..373: mol_type = other DNA
gaggtgcagctggtggagtctgggggaggcttggtccagcctggggggtccctgagactctcctgtgcagcctctggattcacctttaataactattggatgagctgggtccgccaggctccagggaaggggctggagtgggtggccaacataaaccaagatggaagtgagaaatactatgtggactctgtgatgggccgattcgccatctccagagacaacgccaagaactcactgtatctgcaaatgaacagcctgagagccgaggacacggccgtgtattactgtgcgagagatcaagggtacggtgactactttgagtataactggttcgacccctggggccagggaaccctggtcaccgtctcctcag

SEQ ID NO: 720 - DNA, 322 bp, synthetic construct
  misc_feature 1..322: note = Synthetic
  source 1..322: mol_type = other DNA
gacatccagttgacccagtctccatccttcctgtctgcatctgtaggagacagagtcaccatcacttgccgggccagtcagggcatttacagttatttagcctggtatcagcaaaaaccagggaaagcccctaagctcctgatctatgctgcatccactttgcaaagtggggtcccatcaaggttcagcggcagtggatctgggacagaattcactctcacaatcagcagcctgcagcctgaagattttgcaacttattactgtcaacagcttaatagttacccgataaccttcggccaagggacacgactggagattaaac

SEQ ID NO: 721 - DNA, 373 bp, synthetic construct
  misc_feature 1..373: note = Synthetic
  source 1..373: mol_type = other DNA
gaggtgcagctgttggagtctgggggaggcttggtgcagcctggggggtccctgagactctcctgtgcagcctctgggttcacctttagcagctatgccatgaactgggtccgccaggctccagggaaggggctggagtgggtctcagctattagtggtagtggtgatagcacatactacgcagactccgtgaagggccggttcaccatctccagagacaattccaagaacacgctgtatctgcaaatgaacagcctgagagccgaggacacggccgtatattactgtgcgaaagcggaacggattattatgatggtagtggttaccctttttgactactggggccaggggaccctggtcaccgtctcctcag

SEQ ID NO: 722 - DNA, 331 bp, synthetic construct
  misc_feature 1..331: note = Synthetic
  source 1..331: mol_type = other DNA
cagtctgtgctgactcagccgccctcagtgtctgcggccccaggacagaaggtcaccatctcctgctctggaagcagctccaacattgggaataattatgtatcctggtaccagcagctcccaggaacagcccccaaactcctcatctatgaaaataataagcgaccctcagggattcctgaccgattctctggctccaagtctggcacgtcagccaccctgggcatcaccggactccagactggggacgaggccgattattactgcggaacatgggatagcagcctgagtgcttgggtgttcggcggagggaccaagctgaccgtcctag

SEQ ID NO: 723 - DNA, 370 bp, synthetic construct
  misc_feature 1..370: note = Synthetic
  source 1..370: mol_type = other DNA
caggtccagctggtacagtctggggctgaggtgaagaagcctggggcctcagtgaaggtctcctgcaaggtttccggatacaccctccctgaattatccatgcactgggtgcgacaggctcctggaaaagggcttgagtggatgggaggttttgatcctgaagatggtgaaacaatctacgcacagaagttccagggcagagtcaccatgaccgaggacacatctacagacacagcctacatggagctgagcagcctgagatctgaggacacggccgtgtatttctgtgcaacctcctcggctctgatgacgacagtaactacttggttcgacccctggggccagggaaccctggtcaccgtctcctcag

SEQ ID NO: 724 - DNA, 334 bp, synthetic construct
  misc_feature 1..334: note = Synthetic
  source 1..334: mol_type = other DNA
cagtctgtgctgactcagccgccctcagtgtctgcggccccaggacagaaggtcaccatctcctgctctggaagcagctccaacattgggaataattatgtatcctggtaccagcagctcccaggaacagcccccaaactcctcatctatgaaaataataagcgaccctcagggattcctgaccgattctctggctccaagtctggcacgtcagccaccctgggcatcaccggactccagactggggacgaggccgattattactgcggaacatgggatagcagtctgagtgctggggcggtgttcggcggagggaccaagctgaccgtcctag

SEQ ID NO: 725 - DNA, 379 bp, synthetic construct
  misc_feature 1..379: note = Synthetic
  source 1..379: mol_type = other DNA
caggtgcagctggtgcagtctggggctgaggtgaagaagcctggggcctcagtgaaggtctcgtgcaaggcttctggatacaccttcaccggctactatatacactggatgcgacaggcccctggacaagggcttgagtgggtgggacggatcaaccctgacaatggtggcggaaactctgcacagaagtttctgggcagggtcaccatgaccacagacacgtccatcaacacagcctacatggaactgagcgggctgacacctgacgacacggccgtatatttctgtgcgagagattacgtattggtctggttcggggaattattgacaaactacttcgacgcctggggccagggaaccctggtcaccgtctcctcag

SEQ ID NO: 726 - DNA, 331 bp, synthetic construct
  misc_feature 1..331: note = Synthetic
  source 1..331: mol_type = other DNA
cagtctgtgctgacgcagccaccctcagcgtctgggacccccgggcagagggtcaccatctcttgttctggaagcagctccaacatcggaagtaataatgtatactggtaccagcagctcccaggaacggcccccaaactcctcatctataggagtaatcagcgaccctcaggggtctctgcccgattctctggttccaagtctggcacctcagcctccctggccatcagtgggctccggcccgacgatgaggctcattatcactgtgcaacatgggatgacagcctgagtgtcgtggtgttcggcggcgggaccaaggtgaccgtcctag

SEQ ID NO: 727 - DNA, 364 bp, synthetic construct
  misc_feature 1..364: note = Synthetic
  source 1..364: mol_type = other DNA
gaggtgcagctggtggagtctgggggagtcgtggtacagcctggggggtcccagagactctcctgtgcagcctctggattcacctttgattattatgccatgcactgggtccgtcaagctccggggaagggtctggagtgggtctctcttattagttgggatggtactaacacctactatgcagactctgtgaagggtcgattcaccatctccagagacaacaacaaaaactccctgtatctgcaaatgaacagtctgagagctgaggacaccgccttgtattactgtgcaagaggcgagggttcggcgggatacagcttccccggctactggggccagggaaccctggtcaccgtctcctcag

SEQ ID NO: 728 - DNA, 331 bp, synthetic construct
  misc_feature 1..331: note = Synthetic
  source 1..331: mol_type = other DNA
cagtctgtgctgactcagccaccctcagcgtctgggacccccgggcagagggtcaccatctcttgttctggaagcagctccaacatcggaagtaattatgtatactggtaccagcagctcccaggaacggcccccaaactcctcatctataggaataatcagcggccctcaggggtccctgaccgatgctctggctccaagtctggcacctcagcctccctggccatcagtgggctccggtccgaggatgaggctgattattactgtgcaacatgggatgacagcctgagtggtgtggtattcggcggagggaccaagctgaccgtcctag

SEQ ID NO: 729 - DNA, 364 bp, synthetic construct
  misc_feature 1..364: note = Synthetic
  source 1..364: mol_type = other DNA
caggtccagctggtacagtctggggctgaggtgaagaagcctggggcctcagtgaaggtctcctgcaaggtttttggattcaccctcattgaattatccatacactgggtgcgacaggctcctggaaaagggcttgagtggatgggcggttttgatcctgaagatgctgaaacaatctacgcacagaagttccagggcagagtcaccatgaccgaggacacatctacagacacagcctacatggagctgagcagtctgagatctgaggacacggccgtgtattactgtgcaacagtgggacagcggcagctggagggctggttcgacccctggggccagggaaccctggtcaccgtctcctcag

SEQ ID NO: 730 - DNA, 334 bp, synthetic construct
  misc_feature 1..334: note = Synthetic
  source 1..334: mol_type = other DNA
cagtctgccctgactcagcctccctccgcgtccgggtctcctggacagtcagtcaccatctcctgcactggaaccagcagtgacgttggtggttataactatgtctcctggtaccaacagcacccaggcaaagcccccaaactcatgatttatgaggtcagtaagcggccctcaggggtccctgatcgcttctctggctccaagtctggcaacacggcctccctgatcgtctctgggctccaggctgaggatgaggctgattattactgcagctcatatgcaggcagcaacaacccctttgtcttcgggagtgggaccaaggtcaccgtcctag

SEQ ID NO: 731 - DNA, 364 bp, synthetic construct
  misc_feature 1..364: note = Synthetic
  source 1..364: mol_type = other DNA
caggtccagctggtacagtctggggctgaggtgaagaagcctggggcctcagtgaaggtctcctgcaaggtttccggatacaccctcattgaattatccatgcactgggtgcgacaggctcctggaaaagggcttgagtggatgggaggttttgatcctgaagatggtgaaacaatctacgcacagaagttccagggcagagtcaccatgaccgaggacacatctacagacacagcctacatggagctgagcagcctgagatctgaggacacggccgtgtattattgtgcagtaaactcggcggaggtgactacgtactggttcgacccctggggccagggaaccctggtcaccgtctcctcag

SEQ ID NO: 732 - DNA, 331 bp, synthetic construct
  misc_feature 1..331: note = Synthetic
  source 1..331: mol_type = other DNA
cagtctgccctgactcagcctccctccgtgtccgggtctcctggacagtcagtcaccatctcctgcactggaaccagcagtgacgttggtagttatgaccgtgtctcctggtaccggcagcccccaggcacagcccccaaactcatgatttatgaggtcagtaatcggccctcaggggtccctgatcgcttctctgggtccaagtctggcaacacggcctccctgaccatctctgggctccaggctgaggacgaggctgattattactgcacctcatatacaagcagcagccctgtggtattcggcggagggaccaagctgaccgtcctag

SEQ ID NO: 733 - DNA, 364 bp, synthetic construct
  misc_feature 1..364: note = Synthetic
  source 1..364: mol_type = other DNA
caggtccagctggtacagtctggggctgaggtgaagaagcctggggcctcagtgaaggtctcctgcaaggtttccggatacactatcactgaaatatccatacactgggtgcgacaggctcctggaaaagggcttgagtggatgggaggttttgatcctgaagatggtgaaacaatctacgcacagaggttccagggcagagtcaccatgaccgaggacacatctacagacacagcctacatggagctgagtaatgtgagatctgaggacacggccgtgtattactgtgcaatgtctccagctattatctcttcttactggttcgacccctggggccagggaaccctggtcaccgtctcctcag

SEQ ID NO: 734 - DNA, 337 bp, synthetic construct
  misc_feature 1..337: note = Synthetic
  source 1..337: mol_type = other DNA
cagtctgccctgactcagcctgcctccgtgtctgggtctcctggacagtcgatcaccatctcctgcactggaaccagcagtgacgttggtggttataactctgtctcctggtaccaacaacacccaggcaaagcccccaaactcatgatttatgatgtcactaatcggccctcaggggtttctaatcgcttctctggctccaagtctggcaacacggcctccctgaccatctctgggctccaggctgaggacgaggctgattattactgcagctcatatacaaacagcagcactcctgattatgtcttcggaactgggaccaaggtcaccgtcctag

SEQ ID NO: 735 - DNA, 361 bp, synthetic construct
  misc_feature 1..361: note = Synthetic
  source 1..361: mol_type = other DNA
gaggtgcagctggtggagtctgggggaggcttggtccagcctggggggtccctgagactctcctgtgcagcctctggattcacctttagtagctattggatgagctgggtccgccaggctccagggaaggggctggagtgggtggccaacattaagcaagatggaagtgagaagtattatgtggactctgtgaagggccgattcaccatctccagagacaacgccaagaactcactgtatctacagatgaacagcctgagagccgaggacacggctgtgtattattgtgcgagaccccctgactaccctttgccctactttgactactggggccagggaaccctggtcaccgtctcctcag

SEQ ID NO: 736 - DNA, 319 bp, synthetic construct
  misc_feature 1..319: note = Synthetic
  source 1..319: mol_type = other DNA
tcctatgagctgactcagccaccctcagtgtccgtgtccccaggacagacagccagcatcacctgctctggagataaattgggggataaatttgcttgctggtatcagcataagccaggccagtcccctgtgctggtcatctctcaggataccaagcggccctcagggatccctgagcgattctctggctccaactctgggaacacagccactctgaccatcagcgggacccaggctatggatgaggctgactattactgtcaggcgtgggacagcaactcttatgtcttcggaactgggaccagggtcaccgtcctag

SEQ ID NO: 737 - DNA, 361 bp, synthetic construct
  misc_feature 1..361: note = Synthetic
  source 1..361: mol_type = other DNA
gaagtgcagctggtggagtctgggggaggcttggtacagcctggcaggtccctgagactctcctgtgcagcctctggattcaccttcgatgattatgccatgcactgggtccggcaagctccagggaagggcctggagtgggtctcaggtattagttggaatagtggtagcataggctatgcggactctgtgaagggccgattcaccatctccagagacaacgccaagaactccctgtatctgcaaatgaacagtctgagaactgaggacacggccttgtattactgtgcaaaagatatggggtatagcagtggtaccttagactactggggccagggaaccctggtcaccgtctcctcag

SEQ ID NO: 738 - DNA, 331 bp, synthetic construct
  misc_feature 1..331: note = Synthetic
  source 1..331: mol_type = other DNA
cagtctgtgctgactcagccaccctcagcgtctgggacccccgggcagagggtcaccatctcttgttctggaagcagctccaatatcggaagtaattatgtatactggtaccagcagctcccaggaacggcccccaaactcctcatctataggaataatcagcggccctcaggggtccctgaccgattctctggctccaagtctggcacctcagcctccctggccatcagtggactccggtccgaggatgaggctgattattactgtgcagcatgggatgacagcctgagtggcgtggtattcggcggagggaccaagctgaccgtcctag

SEQ ID NO: 739 - DNA, 361 bp, synthetic construct
  misc_feature 1..361: note = Synthetic
  source 1..361: mol_type = other DNA
caggtgcagctggtggagtctgggggaggcgtggtccagcctgggaggtccctgaggctctcctgtgcagcctctggattcaccttcagtagttatgctttccactgggtccgccaggctccaggcaaggggctagagtgggtggcagttatatcatatgatggaagcaataaatactacgcagactccgtgaagggccgattcaccatctccagagacaattccaagaacacgctgtatctgcaaatgaacagcctgagaactgaggacacggctgtgtattactgtgcgaggaattactatgatagtagcgatgcttttgatatctggggccaagggacaatggtcaccgtctcttcag

SEQ ID NO: 740 - DNA, 361 bp, synthetic construct; identical to SEQ ID NO: 739
  misc_feature 1..361: note = Synthetic
  source 1..361: mol_type = other DNA

SEQ ID NO: 741 - DNA, 361 bp, synthetic construct
  misc_feature 1..361: note = Synthetic
  source 1..361: mol_type = other DNA
caggtgcagctggtggagtctgggggaggcgtggtccagcctgggaggtccctgagactctcctgtgcagcctctggattcaccttcagtagctatgctatgcactgggtccgccaggctccaggcaaggggctggagtgggtggcagttatatcatatgatggaagcaatcaatactacgcagactccgtgaagggccgattcaccatctccagggacaattccaagaacactctgtatctgcaaatgaacagcctgagagctgaggacacggctgtgtattactgtgcgagaaattactatgatagtagtgacgcttttgatatctggggccaagggacaatggtcaccgtctcttcag

SEQ ID NO: 742 - DNA, 361 bp, synthetic construct; identical to SEQ ID NO: 741
  misc_feature 1..361: note = Synthetic
  source 1..361: mol_type = other DNA

SEQ ID NO: 743 - DNA, 369 bp, synthetic construct
  misc_feature 1..369: note = Synthetic
  source 1..369: mol_type = other DNA
gaggtgcagctggtggagtctgggggagacttggtacagcctggggggtccctgagactctcctgtgtagtctctggattcaccttcagtagttatagcatgaactgggtccgccaggctccagggaaggggctggagtgggtttcacacattagtagtagtagtagtaccatatactacgcagactctgtgaagggccgactcaccatctccagagacaacgccaagaactcactgtatctgcaaatgaacagcctgagagccgaggacacggctgtctattactgtgcgagagattggtgcggtagaaccagctgccactactacatggacgtctggggcaaagggaccacggtcaccgtctcctca

SEQ ID NO: 744 - DNA, 337 bp, synthetic construct
  misc_feature 1..337: note = Synthetic
  source 1..337: mol_type = other DNA
cagtctgccctgactcagcctgcctccgtgtctgggtctcctggacagtcgatcaccatctcctgcactggaaccagcagtgatgttgggagttataaccttgtctcctggtaccaacagcacccaggcaaagcccccaaactcatgatttatgagggcagtaagcggccctcaggggtttctaatcgcttctctggctccaagtctggcaacacggcctccctgacaatctctgggctccaggctgaggacgaggctgattattactgctgctcatatgcaggtagtagcactctcccttatgtcttcggaactgggaccaaggtcaccgtcctag

SEQ ID NO: 745 - DNA, 369 bp, synthetic construct
  misc_feature 1..369: note = Synthetic
  source 1..369: mol_type = other DNA
gaggtgcagctggtggagtctgggggaggcttggtacagcctggggggtccctgagactctcctgtgcagtctctggattcaccttcagtaactatagcatgaactgggtccgccaggctccagggaaggggctggagtgggtttcatacattagtagtagtagtagtaccatatactacgcagactctgtgaagggccgattcaccatctccagagacaacgccaagaactcactgtatctgcaaatgaacagcctgagagccgaggacacggctgtgtattactgtgcgagagaaagagcagctcgtctctactactactactacatggacgtctggggcaaagggaccacggtcaccgtctcctca

SEQ ID NO: 746 - DNA, 337 bp, synthetic construct
  misc_feature 1..337: note = Synthetic
  source 1..337: mol_type = other DNA
cagtctgccctgactcagcctgcctccgtgtctgggtctcctggacagtcgatcaccatctcctgcactggaaccagcagtgatgttgggagttataaccttgtctcctggtaccaacagcacccaggcaaagcccccaaactcatgatttatgacgtcagtaagcggccctcaggggtttctaatcgcttctctggctccaagtctggcaacacggcctccctgacaatctctgggctccaggctgaggacgaggctgattattactgctgctcatatgcaggtagtagcacttcccatgtggtattcggcggagggaccaagctgaccgtcctag

SEQ ID NO: 747 - DNA, 397 bp, synthetic construct
  misc_feature 1..397: note = Synthetic
  source 1..397: mol_type = other DNA
caggtgcagctggtggagtctgggggaggcgtggtccagcctgggaggtccctgagactctcctgtgcagcgtctggattcaccttcagttcctatggcatgcactgggtccgccaggctccaggcaaggggctggagtgggtggcagttatatggtatgatggaagtaatgaatactatgcagactccgtgaagggccgattcaccatctccaaagacaattccaagaacacgctgtatctgcaaatgaacagcctgagagccgacgacacggctgtgtattactgtgcgagagattcctgggaggtaccccgatactattattacgatagtactgattaccaagggttggttcccgaccactggggccagggaaccctggtcaccgtctcctcag

SEQ ID NO: 748 - DNA, 322 bp, synthetic construct
  misc_feature 1..322: note = Synthetic
  source 1..322: mol_type = other DNA
gacatccagatgacccagtctccatcctccctgtctgcatctgtaggagacagagtcaccatcacttgccgggcaagtcagggcattagaaatgatttaggctggtatcagcagaaaccagggaaagcccctaagctcctgatctatgctgcatccagtttacaaagtggggtcccatcaaggttcagcggcagtggatctggcacagatttcactctcaccatcagcagcctgcagcctgaagattttgcaacttattactgtctacaagattacaattaccctcggacttttggccaggggaccaagctggagatcaaac

SEQ ID NO: 749 - DNA, 363 bp, synthetic construct
  misc_feature 1..363: note = Synthetic
  source 1..363: mol_type = other DNA
caggtgcagctggtggagtctgggggaggcttggtcaagcctagagggtccctgagactctcctgtgcagcctctggattcaccttcagtgactaccacatggggtggatccgccaggctccagggaaggggctggagtggctttcatacattactaatagtagtcctggtgacacaaactacgcagactctgtgaagggccgattcgccatctccagagacaacgccaagaactcactgtatctgcaaatgaacagcctgagacccgaggacacggctgtgtattattgtgcgagagttcacggtgactacgactactacatggacgtctggggcaaagggaccacggtcaccgtctcctca

SEQ ID NO: 750 - DNA, 322 bp, synthetic construct
  misc_feature 1..322: note = Synthetic
  source 1..322: mol_type = other DNA
gacatccagatgacccagtctccttccaccctgtctgcatctgtaggagacagagtcaccatcacttgccgggccagtcagagtattagcagttggttggcctggtatcaacagaaaccagggaaagcccctaagctcctgatttataaggcgtctattttagaaagtggggtcccatcaacgttcagcggcagtggctctgggacagaattcactctcaccatcagcagcctgcagcctgatgattttgcgacttattactgccaacaatatagtagttattctctcactttcggcggagggaccaaggtggagatcaaac

SEQ ID NO: 751 - DNA, 397 bp, synthetic construct
  misc_feature 1..397: note = Synthetic
  source 1..397: mol_type = other DNA
caggtgcagctggtggagtctgggggaggcgtggtccagcctggggggtccctgagactctcctgtgctgcatctggattcaccttcactagctatggcatccactgggtccgccaggctccaggcaaggggctggagtgggtggctatgatttggtatgatggaagtaataaatattatgcagactccgtgaagggccgattcaccatctccagggacgattccatgaacacgctattactgcaaatgaacagcctgagagccgaggacacggctgtgtattactgtgcgagagattcctgggaggtaccccgatattattattatgatagtactgcttatcaagggatggttcccgacttctggggccagggaaccctggtcaccgtctcctcag

SEQ ID NO: 752 - DNA, 319 bp, synthetic construct
  misc_feature 1..319: note = Synthetic
  source 1..319: mol_type = other DNA
gacatccagatgacccagtctccatcctccctgtctgcatctgtaggagacagagtcaccatcacttgtcgggcaagtcaggacattagaaatgatttaggctggtatcagcagaaaccagggaaagcccctaagctcctgatctatgctgcatccagtttacaaagtggggtcccatcaaggttcagcggcagtggatctggcacagagttcactctcaccatcagcaccctgcagcctgaagattttgcaacttattactgtctacaagatttcaattaccctcggacttttggccaggggaccaagctggagatca

SEQ ID NO: 753 - DNA, 381 bp, synthetic construct
  misc_feature 1..381: note = Synthetic
  source 1..381: mol_type = other DNA
caggtgcagctggtggagtctgggggaggcgtggtccagcctgggaggtccctgagactctcctgtgcagcgtctggattcaccttcagtaactctggcatgaattgggtccgccaggctccaggcaagggactggagtgggtggcacttatagggtatgatggaagtaataaatattatgtggactccgtgaagggccgattcaccatctccagagacaatcccaagaatatgctgtatctgcaaatgagcagcctgagagccgaggacacggctgtgtattactgtgcgagagatccaaccgacgattacgatctttggagtggttattattatggtatggacatctggggccaagggaccacggtcaccgtctcctca

SEQ ID NO: 754 - DNA, 322 bp, synthetic construct
  misc_feature 1..322: note = Synthetic
  source 1..322: mol_type = other DNA
gaaattgtgttgacacagtctccagccaccctgtctttgtctccaggggaaagagccaccctctcctgcagggccagtcagagtgttagcagctacttggcctggtaccaacagaaacctggccaggctcccaggctcctcatctatgatgcatccaacagggccactggcatcccagccaggttcagtggcagtgggtctgggacaggcttcactctcaccatcagcagcctagagcctgaagattttgcagtttatttctgtcagcagcgtggcaactggtcgtacacttttggccaggggaccaagctggagatcaaac

SEQ ID NO: 755 - DNA, 375 bp, synthetic construct
  misc_feature 1..375: note = Synthetic
  source 1..375: mol_type = other DNA
gaggtgcagctgttggagtctgggggtggcctggtgcagcctggggggtccctgagactctcctgtgcagcttctggattcacctttagtaactttgtcatgagctgggtccgtcaggctccagggaaggggctggagtgggtctcagctattagcggtagtggtggtagcatatattattcaggctccgtgaagggccggttcaccatctccagagacaattccaagaacaccctgtatctgcaaatgaacagcctgagagccgaggacacggccgtatattactgtgcgaaagagggtgatagcagcacctggtattactactactactacatggacgtctggggccaaggggccacggtcaccgtctcctca

SEQ ID NO: 756 - DNA, 337 bp, synthetic construct
  misc_feature 1..337: note = Synthetic
  source 1..337: mol_type = other DNA
cagtctgccctgactcagcctgcctccgtgtctgggtctcctggacagtcgatcaccatctcctgcactggaaccagcagtgatattgggagttataaccttgtctcctggtaccaacaacacccaggcaaagcccccaaactcatgatttatgacgtcactaagcgaccctcaggggtttctaatcgcttctctggctccaagtctggcaacacggcctccctgacaatctctgggctccaggctgaggacgaggctgattattactgctgctcatatgcaggtagtaacactttctatgtggtattcggcggagggaccaagctgaccgtcctag

SEQ ID NO: 757 - DNA, 378 bp, synthetic construct
  misc_feature 1..378: note = Synthetic
  source 1..378: mol_type = other DNA
gaggtgcagctggtggagtctgggggaggcctggtcaagcccggggggtctctgaggctctcctgtgcagcctctggattcagcttcaacaactctaacatgaactgggtccgccaggctccagggaagggactggagtgggtctcatccattagcagtagtagtaattacatatactatgtggactcagtgaagggccgattcaccatttccagagacaacgccaagaactcactgtatctgcagatgagtagcctgagagtcgaagacacggctgtttattattgtgcgagcgcacagagtagtgccagatggggcggctattaccagtatgctatggacgtctggggccaagggaccacggtcaccgtctcctca

SEQ ID NO: 758 - DNA, 322 bp, synthetic construct
  misc_feature 1..322: note = Synthetic
  source 1..322: mol_type = other DNA
gaaatagtgatgacgcagtctccagccaccctgtctgtgtctccaggggaaagagccaccctctcctgcagggccagtcagagtgttagcagcagcttagcctggtaccagcagaaacctggccaggctcccaggctcctcatctatgatgcatccaccagggccactggtatcccagccaggttcagtggccgtgggtctgggacagaattcactctcaccatcagcagcctgcagtctgaagattttgctgtttattactgtcagcagtattataactggcctccgtggacgttcggccaagggaccaaggtggaaatca

SEQ ID NO: 759 - DNA, 384 bp, synthetic construct
  misc_feature 1..384: note = Synthetic
  source 1..384: mol_type = other DNA
caggtgcagctggtgcagtctggggctgaggtgaagaagcctggggcctcagtgaaagtttcctgcaaggcttctggatacaccttcaccaggtactatatgcactgggtgcgacaggccccgggacaagggcttgagtggatgggaataatcaaccctagtggtggtagcacaagctacgcacagaagttccagggcagagtcaccatgaccagggacacgtccacgagcacagtctgcatggagctgagcagcctgagatctgaggacacggccgtgtattattgtgcgagagattttacggagactacggtgactacctcgaccaactactactacggtatggacgtctggggccaagggaccacggtcaccgtctcctca

SEQ ID NO: 760 - DNA, 325 bp, synthetic construct
  misc_feature 1..325: note = Synthetic
  source 1..325: mol_type = other DNA
tcctatgagctgactcagccaccctcggtgtcagtgtccccaggacagacggccaggatcacctgctctggagatgcattgccaaagcaatatgcttattggtaccagcaaaagccaggccaggcccctgtgctggtgatatataaagacattgagaggccctcagggatccctgagcgactctctggctccagctcagggacaatagtcacgttgaccatcagtggagtccaggcagaagacgaggctgactattactgtcaatcagcagacagcagtggtagttatgttgttttcggcggagggaccaaactgaccgtcctag

SEQ ID NO: 761 - DNA, 384 bp, synthetic construct
  misc_feature 1..384: note = Synthetic
  source 1..384: mol_type = other DNA
caggtgcagctggtgcagtctggggctgaggtgaagaagcctgggtcctcggtgaaggtctcctgcaaggcttctggaggcaccttcatcaacgatgctatcacctgggtgcgacaggcccctggacaagggcttgagtggatgggagggatcattcctatccttgatatagcaaactacgcacagaagttccagggcagagtcacaattaccgcggacaaatccacgagcacagcctacatggagctgaacagcctgagatctgacgacacggccgtgttttactgtgcgagagtcccgcaggcgggagcagctcgggggcatttctactactaccacggtttggatgtctggggccaggggaccacggtcaccgtctcctca

SEQ ID NO: 762 - DNA, 325 bp, synthetic construct
  misc_feature 1..325: note = Synthetic
  source 1..325: mol_type = other DNA
gaaattgtgttgacgcagtctccaggcaccctgtctttgtctccaggggaaagagccaccctctcctgcaggaccagtcagagtgttagcaacaactacttagcctggtaccagcaaaaacttggccaggctcccaggctcctcatctatggtgcatctagcagggccactggcatcccagacaggttcagtggcagtgggtctgggacagacttcactctcatcatcagcagactggagcctgaagattttgcagtgtattactgtcagcagtatggtagctcacccctcactttcggcggagggaccagggtggaaatcaaac

SEQ ID NO: 763 - DNA, 370 bp, synthetic construct
  misc_feature 1..370: note = Synthetic
  source 1..370: mol_type = other DNA
caggtgcagctggtggagtctgggggaggcgtggtccagcctgggaggtccctgagactctcctgtgcagcctctggattcaccttcagtagccatggcatgcactgggtccgccaggccccaggcaaggggctggagtgggtggcaattatctcatttgatggaagtaacacagactatgcagactccgtgaagggccgattcaccatctccagagacaattccaagaacacgctgtatctgcaaatgaacaacctgagagttgaggatacggctgtgtattactgtgcgaaagataaggacgatggctggtacttcataaactactttgactactggggccagggaaccctggtcaccgtctcctcag

SEQ ID NO: 764 - DNA, 328 bp, synthetic construct
  misc_feature 1..328: note = Synthetic
  source 1..328: mol_type = other DNA
gaaattgtgttgacgcagtctccaggcaccctgtctttgtctccagggcaaagagccaccctctcctgcagggccagtcagagtcttagcagcaactacttagcctggtaccagctgagacctggccaggctcccagactcctcatctatggtgcatccaccagggccactggcatcccagacaggttcagtggcagtgggtctgggacagacttcactctcaccatcagcagactggagcctgaagattttgccgtgtattactgtcaccactatggtacctcaccggggttcactttcggccctgggaccaaagtggatatcaaac

SEQ ID NO: 765 - DNA, 373 bp, synthetic construct
  misc_feature 1..373: note = Synthetic
  source 1..373: mol_type = other DNA
caggtccagctggtacagtctggggctgaggtgaagaagcctggggcctcagtgaaagtctcctgcaaggtttccggatacaccctcattgaattatccattcactgggtgcgacaggctcctggaaaagggcttgagtggatgggaggttttcatcctgaggaggctaaaacaatctacgcacagaacttccagggcagagtcaccatgaccgaggacacatctacagacacagcctacatggagctgaccagcctaagatctgaagacacggccgtatattactgtgcaacagggggccccgtttgttccacctgctatatttcctggttcgacccctggggccagggaaccctggtcaccgtctcctcag

SEQ ID NO: 766 - DNA, 337 bp, synthetic construct
  misc_feature 1..337: note = Synthetic
  source 1..337: mol_type = other DNA
cagtctgtgctgactcagccgccctcagtgtctgcggccccaggacagaaggtcaccatctcctgctctggaagcagctccaacattggaaataattatgtatcctggtaccagcagctcccaggaacagcccccaaactcgtcatctatgagaataataagcgacctccaggaattcctgaccgattctctggctccaagtctggcacgtcagccaccctgggcatcaccggactccagactggggacgaggccgattattactgcggaacatgggatagcagcctgagtgcttttgatgtgatattcggcggagggaccaagctgaccgtcctag

SEQ ID NO: 767 - DNA, 373 bp, synthetic construct
  misc_feature 1..373: note = Synthetic
  source 1..373: mol_type = other DNA
gaggtgcagctggtggagtctgggggaggcttggtccggcctggggggtccctgagactctcctgtgcagcctctggattcatctttaatgactattggatgagttgggtccgccaggctccagggaaggggctggagtgggtggccaacataaaccaagatggaagtgagacatattatgtggactctatgaggggccgattcaccatctccagagacaacgccgggaagtcactgcatctacaaatgagtagcctgagacccgaggacacggccgtctattattgtgcgagagatcaagggtacggtcactaccttgagtacaactggttcgacccccggggccagggaaccctggtcaccgtctcctcag

SEQ ID NO: 768 - DNA, 322 bp, synthetic construct
  misc_feature 1..322: note = Synthetic
  source 1..322: mol_type = other DNA
gacatccagttgacccagtctccatccttcctgtctgcatctgtaggagacagagtcaccatcacttgccgggccagtcaggtcattagcagttatttagcctggtatcagcaaaaaccagggaaagcccctaagtccctgatctatgctgcatccactttgcaaagtggggtcccatccaggttcagcggcagtggatctgggacagaattcactctcacaatcagcagcctgcagcctgaagattttgcaacttattactgtcaacagcttcatagttacccgattaccttcggccaagggacacgactggagattaaac

SEQ ID NO: 769 - DNA, 373 bp, synthetic construct
  misc_feature 1..373: note = Synthetic
  source 1..373: mol_type = other DNA
gaggtgcagctgttggagtctgggggaggcttggtacagcctggggggtccctgagactctcctgtgcagcctctggattcacctttagcaagtatgccatgagctgggtccgccaggctccagggaaggggctggagtggctctcagctattagtggtagtggtgatagcacattctacgcagactccgtgaagggccggttcaccatctccagagacaattccaagaacacgctgtatctgcaaatgaacagcctgagagccgaggacacggccatatattactgtgcgaaagcggaacggattactatgatagtagtgcttaccctttttgactactggggccagggaaccctggtcaccgtctcctcag

SEQ ID NO: 770 - DNA, 331 bp, synthetic construct
  misc_feature 1..331: note = Synthetic
  source 1..331: mol_type = other DNA
cagtctgtgctgactcagccgccctcagtgtctgcggccccaggacagaaggtcaccatctcctgctctggaagcagctccagcattgggaataattatgtatcctggtaccaacagctcccaggaacagcccccaaactcctcatctatgaaaataataagcgaccctcagggattcctgaccgattctctggctccaagtctggcacgtcagccaccctgggcatcatcggactccagactggggacgaggccgattattactgcggaacatgggatagcagcctgagtgcttgggtgttcggcggagggaccaagctgaccgtcctag

SEQ ID NO: 771 - DNA, 376 bp, synthetic construct
  misc_feature 1..376: note = Synthetic
  source 1..376: mol_type = other DNA
gaggtgcagctggtggagtctgggggaggcctggtcaagcctggggggtccctaagactctcctgtggagtcgctggattcaccttcaattcctataccatgaactgggtccgccaggctccagggaaggggctggagtgggtctcagccattagtactactactaattccatctactactcagactcagtgaagggccgattcaccatctccagagacaacgccgagaactcactgtatctgcagatgagcagcctgagagtcgaggacacggctgtatattactgtgcgagatctgggttggggatgcaactgtggttggagagttactactttgaccactggggccagggaaccctggtcaccgtctcctcag

SEQ ID NO: 772 - DNA, 337 bp, synthetic construct
  misc_feature 1..337: note = Synthetic
  source 1..337: mol_type = other DNA
cagtctgccctgactcagcctgcctccgtgtctgggtctcctggacagtcgatcaccatctcctgcactggaaccagcagtgatgttgggacttataaccttgtctcctggtaccaacatcacccaggcaaagcccccaaagtcatgatttatgacgtcagtaagcggccctcagggatttctaatcgcttctctggctccaagtctggcaacacggcctccctgacaatctctagtctccaggccgaggacgaggctgattattactgctgctcatatgcaggtagtagcactctcaatgtggtattcggcggagggaccaagctgaccgtcctag

SEQ ID NO: 773 - DNA, 376 bp, synthetic construct
  misc_feature 1..376: note = Synthetic
  source 1..376: mol_type = other DNA
gaggtgcagctgttggagtctgggggaggcttggtaaagccgggggggtccctgagaatctcctgtacagcctctggattcacttttagcaattatgccatgacctgggtccgccaggctccagggaaggggctggagtgggtctcaagtattagtggtagtggtggtagcatctactacgcagactccgtgaagggccgattcaccatctccagagacaattccaagaatacgatgtttctgcaattgaacagcctgagaaccgaggacacggccgtttattactgtgcgaaagattttgggacattacaatggtttggggaggcctactcttttgactactggggccagggaaccctggtcaccgtctcctcag

SEQ ID NO: 774 - DNA, 337 bp, synthetic construct
  misc_feature 1..337: note = Synthetic
  source 1..337: mol_type = other DNA
cagtctgccctgactcagcctgcctccgtgtctgggtctcctggacagtcgatcaccatctcctgcactggaaccagcagtgatgttgaaggttatgacctcgtctcctggtaccaacagcacccaggcaaagcccccaaactcataatttatgacgtcactaagcggccctcaggggtttctaatcgcttctctggctccaagtccggcaacacggccgccctgacaatctctgggctccaggctgaggacgaggctgattattactgctgttcatatgcgggtagtaccacacgtcctgtggtattcggcggagggaccgagctgaccgtcctag

SEQ ID NO: 775 - DNA, 394 bp, synthetic construct
  misc_feature 1..394: note = Synthetic
  source 1..394: mol_type = other DNA
gaggtgcagctggtggagtctgggggaggcttggtgaagccgggggggtcccttagactctcctgtgcagcctctggattcaacttcaataaagcctggatgggttgggtccgccaagctccaggaaaggggctggagtgggttggccgtattaaaagcgagattgatgctgggacaacagactacagtgcacccgtgaaaggcagattcaccatttcaagagatgattcggaaaacaccctgtatttggaaatgaacagcctgaaagtcgaggacacaggcgtctattactgcaccacagcgcagttccaggtgccgaggttcgtctgggtcggagacttaatgaactactttgacaactggggccagggagccctggtcaccgtctcctcag

SEQ ID NO: 776 - DNA, 322 bp, synthetic construct
  misc_feature 1..322: note = Synthetic
  source 1..322: mol_type = other DNA
gaaattgtgttgacgcagtctccaggcaccctgtctttgtctccaggggaaagagccaccctctcctgcagggccagtcagagtgttagcagcaactacttagcctggtaccagcagaaacctgggcaggctcccaggctcctcatctatggtgcatccggcagggccactggcatcccagacaggttcagtggcagtgggtctgggacagacttcactctcaccataagcagactggagcctgaagattttgcagtgtattattgtcagcaatatgataattcaccgctcactttcggcggagggaccaaggtggaaatca

SEQ ID NO: 777 - DNA, 375 bp, synthetic construct
  misc_feature 1..375: note = Synthetic
  source 1..375: mol_type = other DNA
gaggtgcagctggtggagtctgggggaggcctggtcaagccgggggggtccctgagactctcctgtgtagcctctggattcaccttcagtagccataacatgaactgggtccgccaggctccagggaaggggctggagtgggtctcatttattagtactagtagtagttccatatactacgcagactcagtgaagggccgattcaccatctccagagacaacgccaagaactcactgtatctgcaaatgagcagcctgagagccgaggacacggctgtctattactgttcgagagatcctccgagtccgacaaattactactactactactacatggacgtctggggcaaagggaccacggtcaccgtctcctca

SEQ ID NO: 778 - DNA, 337 bp, synthetic construct
  misc_feature 1..337: note = Synthetic
  source 1..337: mol_type = other DNA
cagtctgccctgactcagcctgcctccgtgtctgggtctcctggacagtcgatcaccatgtcctgcactggaaccagcagtgatgttgggagttataaccttgtctcctggtaccaacaacacccaggcaaagcccccaaactcatgatttatgacgtcagtaagcggccctcaggggtttctattcgcttctctggctccaagtctggcaacacggcctccctgacaatctctggcctccaggctgaggacgaggctgactattactgctgctcatatgcaggtattaccactttcccttatgtcttcggaactgggaccaaggtcaccgtcctag

SEQ ID NO: 779 - DNA, 370 bp, synthetic construct
  misc_feature 1..370: note = Synthetic
  source 1..370: mol_type = other DNA
cagctgcagctgcaggagtcgggcccaggactggtgaagcctgcggagaccctgtccctcacctgcactgtctctggtggctccataagcagtagtaattattattggggctggatccgccagcccccagggaaggggctggagtggattggaaatattttttatagtgggatcacctactacaacccgtccctcaagggtcgagtctccatctcagtagacacgtccaagaaccaattctccctgaaggtgagctctgtgaccgtcgcggacacggccgtgtattactgtgcgagagatgtggaaacaactctctaccttgggactcttgatatctggggcccagggacaatggtcaccgtctcttcag

SEQ ID NO: 780 - DNA, 322 bp, synthetic construct
  misc_feature 1..322: note = Synthetic
  source 1..322: mol_type = other DNA
gacatccagatgacccagtctccatcctccctgtctgcatctgttggagacagagtcaccatcacttgccgggcgagtcagggcattagaaatgatttaggctggtatcagcagaaaccagggaaagcccctaagcgcctgatctatgctgcatccaatttgcaaagtggggtcccatcaagattcagcggcagtggatctgggacagaattcactctcacaatcagcagcctgcagcctgaagattttgcaacttatttctgtctacagcataatagttaccctcagtcgttcggccaagggaccaaggtggaaatcaaac

SEQ ID NO: 781 - DNA, 364 bp, synthetic construct
  misc_feature 1..364: note = Synthetic
  source 1..364: mol_type = other DNA
gaggtgcagctggtggagtctgggggagtcgtggtacagcctggggggtccctgagactctcctgtgcagcctctggattcacctttgattatcatgccatgcactgggtccgtcaagctccggggaagggtctggagtgggtctctcttattagttgggacggtactaacacgtactatgcagactctgtgaagggtcgattcaccatctccagagacaacagcaaaaactccctgtatctgcaaatgaacagtctgagaggtgaggacaccgccttatattactgtgcaagaggcgagggtgcggcgggatacagcttccccgactactggggccagggaaccctggtcaccgtctcctcag

SEQ ID NO: 782 - DNA, 329 bp, synthetic construct
  misc_feature 1..329: note = Synthetic
  source 1..329: mol_type = other DNA
cagtctgtgctgactcagccaccctcagcgtctgggacccccgggcagagggtcaccatctcttgttctggaagcagctccaacatcgggagtaattatgtctactggtaccagcagctcccaggaacggcccccaaactcctcatctataggaataatcagcggccctcaggggtccctgaccgattctctggctccaagtctggcacctcagtctccctggccatcagtgggctccggtccgacgatgaggctgattattactgtgcgtcatgggatgacagcctgaggggtgtggtattcggcggagggaccaaggtgaccgtcct

SEQ ID NO: 783 - DNA, 379 bp, synthetic construct
  misc_feature 1..379: note = Synthetic
  source 1..379: mol_type = other DNA
gaggtgcagctgttggagtctgggggaggcttggtacagcctggggggtccctgagactctcctgtgcagcctctggattcacctttaataaatatgccatgagctgggtccgccaggctccagggaaggggctggagtgggtctcaggtattggtggtagcggtggtaccatatattacgcagactccgtgaagggccggttcaccatctccagagacagttccaagaacacgctgtatctgcaaatgaatagcctgcgagccgacgacacggccgtatattactgtgcgaaagactcagtttggaaagtgttggtcattattgctgggggctactttgactactggggccagggaaccctggtcaccgtctcctcag

SEQ ID NO: 784 - DNA, 322 bp, synthetic construct
  misc_feature 1..322: note = Synthetic
  source 1..322: mol_type = other DNA
gacatccagatgacccagtctccatcctccctgtctgcgtctgtaggagacagagtcaccatcacttgccgggcaagtcagggcattagtagctatttaaattggtatcagcagaaaccagggaaagcccctaaactcctgatctatgctgcaaccagtttgcaaagcggggtcccatcaaggttcagtggcagtggatctgggacagatttcactctcaccatcagcaatctgcaatctgaagattttgcaacttactactgtcaacagagttacagtacccctccgacgttcggccaagggaccaaggtggagatcaaac

SEQ ID NO: 785 - DNA, 379 bp, synthetic construct
  misc_feature 1..379: note = Synthetic
  source 1..379: mol_type = other DNA
caggttcagctggtgcagtctggagctgaggtgaagaagcctggggcctcagtgaaggtctcctgcaaggcttctggttacacccttaccagctatggtatcagctgggtgcgacaggcccctggacaagggcttgagtggatgggatggatcagcgctcacaatggtaacacaaactatgcacagaagttccagggcagagtcaccatgaccacagacacatccacgagcacagcctacatggagctgaggaacctgagatctgacgacacggccgtgtattactgtgcgagattcctcgcccttacgtattactatgatagtagtggttatccgtttgactactggggccagggaagcctggtcaccgtctcctcag

SEQ ID NO: 786 - DNA, 328 bp, synthetic construct
  misc_feature 1..328: note = Synthetic
  source 1..328: mol_type = other DNA
gacatccagatgacccagtctccatcctccctgtctgcatctgtaggagacagaatcaccatcacttgccgggcaagtcagagcattagcagctatttaaattggtatcagcagaaaccggggaaagcccctaagctcctgatctatgctgcatccagtttgcaaagtggggtcccatcaaggttcagtggcagtggatctgggacagatttcactctcaccatcagcagtctgcaacctgaagattttgcaacttactactgtcaacagagttacagtacccctcgaatgtacacttttggccaggggaccaagctggagatcaaac

SEQ ID NO: 787 - DNA, 379 bp, synthetic construct
  misc_feature 1..379: note = Synthetic
  source 1..379: mol_type = other DNA
caggtccagctggtacagtctggggctgaggtgaagaagcctggggcctcagtgaaggtctcctgcaagatttccgaatacaccctcattgaattatccatacactgggtgcgacaggctcctggaaaagggcttgagtggatgggaggttttgatcctgaagatgttaaaacaatctacgcacagaagttccagggcagaatcaccatgaccgaggacacatctacagacacagcctacatggaactgagcagcctgagatctgaggacacggccgtgtattattgtgtagcctctaggggtcccgcctacccgagtgtggtggtgacttctcaatttgacttctggggccagggaaccctggtcaccgtctcctcag

SEQ ID NO: 788 - DNA, 325 bp, synthetic construct
  misc_feature 1..325: note = Synthetic
  source 1..325: mol_type = other DNA
gaaattgtgttgacgcagtctccagccaccctgtcgttgtctccaggggaaagagccaccctctcctgcagggccagtcagagtgttagcagcaactacttagcctggtaccagcagaaacctggccaggctcccaggctcctcatctatggtgcatccagcagggccactggcatcccaggcaggttcagtggcagtgggtctgggacagacttcactctcaccatcagcagactggaacctgaagattttgcagtgtattactgtcagcagtatggtagctcaccgatcaccttcggccaagggacacgactggagattaaac

SEQ ID NO: 789 - DNA, 379 bp, synthetic construct
  misc_feature 1..379: note = Synthetic
  source 1..379: mol_type = other DNA
gaggtgcagctgttggagtctgggggaggcttggtgcagcctggggggtccctgagactctcctgtgcagcctctggattcccctttagcagctatgccatgagctgggtccgccaggctccagggaaggggctggagtgggtctcaggtattaagattagtggtggtagcacacactacgcagattccgtgaagggccggttcaccatctccagagacaattccaagaacacgctgtatctgcaaatgaacagcctgagagtcgaggacacgggcgtatattactgtgcgaaagataggcccccccgttgggtagcagcagctggtatgggagcttttgatatatggggccacgggacaatggtcaccgtctcttcag

SEQ ID NO: 790 - DNA, 325 bp, synthetic construct
  misc_feature 1..325: note = Synthetic
  source 1..325: mol_type = other DNA
tcctatgagctgacacagccaccctcagtgtcagtggccccaggaaagacggccaggattacctgtgggggatacaacattggaagtaaaagtgtgcactggtatcagcagaagccaggccaggcccctgtgttggtcatttattatgatactgaccggccctcagggatccctgagcgattctctggctccaactctgggaacacggccaccctgaccatcaacagggtccaagccggggatgaggccgactattactgtcagatatgggatagtagtagtgataattgggtgttcggcggagggaccgagctgaccgtcctag

SEQ ID NO: 791 - DNA, 370 bp, synthetic construct
  misc_feature 1..370: note = Synthetic
  source 1..370: mol_type = other DNA
caggttcagctggtgcagtctggagctgaggtgaagaagcctggggcctcagtgaaggtttcctgcaaggcttctggttacacctctaccagatacggtttcagctgggtgcgacaggcccctggacaagggcttgagtggatgggatggatcagcacttacaatggtaacacagactatgcacagaagttccagggcagagtcaccatgaccacagacacatccacgagcacagcctacatggaactgaggagcctgagatctgacgacacggccgtgtattactgtgcgagagtgtttgagagtagtgggaggcgcccggggtggttcggcccctggggccagggaaccctggtcaccgtctcctcag

SEQ ID NO: 792 - DNA, 320 bp, synthetic construct
  misc_feature 1..320: note = Synthetic
  source 1..320: mol_type = other DNA
gacatccagatgacccagtctccatcctccctgtctgcatctgtaggagacagagtcaccatcacttgccgggcgagtcagggcattagcaattctttagcctggtatcagcagaaaccagggaaagcccctaagctcctgctctatgctgcatccagattggaaagtggggtcccatccaggttcagtggcagtggatctgggacggattacactctcaccatcagcagcctgcagcctgaagattttgcaacttattactgtcaacagtattatagtacccctagcacgttcggccaagggaccaaggtggaaatcaa

SEQ ID NO: 793 - DNA, 364 bp, synthetic construct
  misc_feature 1..364: note = Synthetic
  source 1..364: mol_type = other DNA
caggtccagctggtacagtctggggctgaggtgaagaagcctggggcctcagtgaaggtctcctgcaaggtttccggatacaccctcattgaattatccatatactgggtgcgacaggctcctggaaaaggacttgagtggatgggaggttttgatcctgaggatggtgaaacaatctacgcacagaaatttcagggcagagtcaccatgaccgaggacacatcaacagacacagcctacatggagctgaacaacctgagatctgaggacacggccgtgtatcactgtgcagccgcgcccccccggggtcggccgggatggttcgacccctggggccagggaaccctggtcaccgtctcctcag

SEQ ID NO: 794 - DNA, 337 bp, synthetic construct
  misc_feature 1..337: note = Synthetic
  source 1..337: mol_type = other DNA
cagtctgccctgactcagcctgcctccgtgtctgggtctcctggacagtcgatcaccatctcctgcactggaaccagcagtgacgttggtggttataactgtgtctcctggtaccaacaacacccaggcaaagcccccaaactcgtgatttatgatgtcagtaatcggccctcaggggtttctaatcgcttctctggctccaagtctggcaacacggcctccctgaccatctctgggctccaggctgaggacgaggctgattattactgcagctcatatacaaacagcagcactcggggggtggtattcggcggagggaccaagctgaccgtcctag

SEQ ID NO: 795 - DNA, 361 bp, synthetic construct
  misc_feature 1..361: note = Synthetic
  source 1..361: mol_type = other DNA
gaggtgcagctggtggagtctgggggaggcttggtccagcctggggggtccctgagactctcctgtgtagcctctgaattcacctttagtgactattggatgacctgggtccgccaggctccagggaaggggctggagtgggtggccaccataaagcaggatggaagtgagacatactttgtggactctgtgaggggccgattcaccatctccagagacaacgccaagaactccctgtatctgcaaatgaacagcctgagagccgacgacacggctgtgtattactgtgcgagagatcacggtgactacgacttgttcttcgatctctggggccgtggctccctggtcaccgtctcctcag

SEQ ID NO: 796 - DNA, 322 bp, synthetic construct
  misc_feature 1..322: note = Synthetic
  source 1..322: mol_type = other DNA
gacatccagatgacccagtctccttccaccctgtctgcatctgtaggagacagagtcaccatcacttgccgggccagtcagagtattagtacctggttggcctggtatcagcagaaagcagggaaagcccctaagctcctgatctataaggcgtctagtttagaaagtggggtcccatcaaggttcagcggcagtggatctgggacagaattcactctcaccatcagcggcctgcagcctgatgattttgcgacttattactgccaacagtatagtacttattctcaaacttttggccaggggaccaagctggagatcaaac

SEQ ID NO: 797 - DNA, 370 bp, synthetic construct
  misc_feature 1..370: note = Synthetic
  source 1..370: mol_type = other DNA
cagctgcagctgcaggagtcgggcccaggcctggtgaagccttcggagaccctgtccctcacctgcattgtctctggtggctccatcagcagtacttactactggggctggatccgccagtctccagggaaggggctggagtggattggcagcatctactctagtgggacaacctactacaacccgtccctcaagagtcgagtcaccatatcaatggacacttccaagaatcaggtctccctgaaactgacctctgtgaccaccgcggacacggccgtgtattactgtgcgagagatccatgggtcccgggagttctttatcactggttcgacccctggggccagggaaccctggtcaccgtctcctcag

SEQ ID NO: 798 - DNA, 328 bp, synthetic construct
  misc_feature 1..328: note = Synthetic
  source 1..328: mol_type = other DNA
tcctatgagctgactcagccaccctcggtgtcggtggccccaggacagacggccaggattacctgtgggggaagtaacattggaggtaaaactgtgcactggtaccagcagaaggcaggccaggcccctgtgctggtcgtcgatgatgatagcgaccggccctctgggatccctgagcgattctctggctccaactctgggaacacggccaccctgaccatcagcagggtcgaagccggggatgaggccgactattactgtcaggtgtgggacagtagtagtgatcatctttatgtcttcggaactgggaccaaggtcaccgtcctag

SEQ ID NO: 799 - DNA, 361 bp, synthetic construct
  misc_feature 1..361: note = Synthetic
  source 1..361: mol_type = other DNA
gaggtgcagctgttggagtctgggggaggcttggtacagcctggggggtccctgagactctcctgtgcagcctctggattcacctttaacagctatgccatgagctgggtccgccaggctccagggagggggctggagtgggtctcaaatattagtggtagtggtggtagcacatactacgcagactccgtgacgggccggttcaccatcaccagagacaattccaagaataccctatatctgcagatgaacagcctgagagtcgaggacacggccatatattactgtgcgaagggatacagtggctacgatttggtgtttgactactggggccagggatccctggtcaccgtctcctcag

SEQ ID NO: 800 - DNA, 319 bp, synthetic construct
  misc_feature 1..319: note = Synthetic
  source 1..319: mol_type = other DNA
gacatccagatgacccagtctccttccaccctgtctgcatctgttggagacagagtcaccatcacttgccgggccagtcagagtattagtagttggttggcctggtatcagcagaaaccagggaaagcccctaagctcctgatctataaggcgtctaatttagaaagtggggtcccatcaaggttcagcggcagtggatctgggacagaattcactctcaccatcagcagcctgcagcctgatgattttgcaacttattactgccaacagtataatggttatttcactttcggcggagggaccaaggtggagatcaaac

SEQ ID NO: 801 - DNA, 385 bp, synthetic construct
  misc_feature 1..385: note = Synthetic
  source 1..385: mol_type = other DNA
gaggtgcagctggtggagtctgggggaggcctggtcaagcctggggggtccctgagactctcctgtgcaacctctggattcaccttcagtaactataacatgaactgggtccgccaggctccagggaaggggctggagtgggtctcatctattagtagtggtggtaatttcatatactacatagactcagtgaagggccgattcaccatctccagagataatgccaagagctcactgtatctgcaaatgaacagcctgagagccgaggacacggctgtgtattactgtgcgagagatgcgccgcaatcttattctgtgaatagtggttattatcccagtccttctgactcctggggccagggaaccctggtcaccgtctcctcag

SEQ ID NO: 802 - DNA, 325 bp, synthetic construct
  misc_feature 1..325: note = Synthetic
  source 1..325: mol_type = other DNA
gaaatagtgatgacgcagtctccagtcaccctgtctgtgtctccaggggaaagagccaccctctcctgcagggccagtcagagtgttagcagcaacttagcctggtaccagcagagacctggccaggctccccggctcctcgtctatggtgcatccaccagggccactggtatcccagtcaggttcagtggcagtgggtctgggacagagttcactctcaccatcagcagcctgcagtctgaagattttgcagtttattactgtcagcactattataactggcctccgtacacttttggccaggggaccaagctggagatcaaac

SEQ ID NO: 803 - DNA, 381 bp, synthetic construct
  misc_feature 1..381: note = Synthetic
  source 1..381: mol_type = other DNA
gaggtgcagctgttggagtctgggggagacttggtacagcctggggggtccctgagactctcctgtgaagcctctggattcccctttagtagttatgccgtgaactgggtccgccaggctccagggaaggggctagagtgggtctcagctataagtggtagtggtggtagtatatattatgcagactccgtgaagggccggttcaccatctccagagacaatcccaagaacacgctgtatctgcaaatgaacagcctgagagccgacgacacggccgtatattactgtacgaaagatgcgtatgactatggttcgaaaaatcatttttattactactactacatggacgtctggggcaaagggaccacggtcaccgtctcc

SEQ ID NO: 804 - DNA, 322 bp, synthetic construct
  misc_feature 1..322: note = Synthetic
  source 1..322: mol_type = other DNA
gaaattgtgttgacgcagtctccaggcaccctgtctttgtctccaggggaaagagccaccctctcctgcagggccagtcagagtgttaccagcaattacttagcctggtaccagcagaaacttggccaggctcccaggctcctcatctatggtgcatccagcagggccactggcatcccagacaggttcagtggcagtgggtctgggacaggtttcactctcaccatcagcagactggagcctgaagatcttgcagtgtattactgtcagcagtatggtagctcaccttcattcggccctgggaccaaagtggatatcaaac

SEQ ID NO: 805 - DNA, 364 bp, synthetic construct
  misc_feature 1..364: note = Synthetic
  source 1..364: mol_type = other DNA
caggtccagctggtacagtctggggctgaggtgaagaagcctggggcctcagtgaaggtctcctgcaaggtttccggatacaccctcactgaattatccatacactgggtgcgacaggctcctggaaaagggcttgagtggatgggaggttttgatcctgaagatgttgaaacaatctacgcacagaagttccagggcagagtcaccatgaccgaggacacatctacagacacagcctacatggagctgagcagcctgagatctgaggacacggccgtgtattactgtgcaacacattatgcagcagctggaaggggactcgttgactactggggccagggaaccctggtcaccgtctcctcag

SEQ ID NO: 806 - DNA, 331 bp, synthetic construct
  misc_feature 1..331: note = Synthetic
  source 1..331: mol_type = other DNA
cagtctgtgctgactcagccgccctcagtgtctgcggccccaggacagaaggtcaccatctcctgctctggaagcagctccaacattgggaataattatgtatcctggtaccagcagctcccaggaacagcccccaaactcctcatctatgaaaataataagcgaccctcagggattcctgaccgattctctggctccaagtctggcacgtcagccaccctgggcatcaccggactccagactggggacgaggccgattattactgcggaacatgggatagcagcctgagtgctggggtgttcggcggagggaccaagctgaccgtcctag

SEQ ID NO: 807 - DNA, 384 bp, synthetic construct
  misc_feature 1..384: note = Synthetic
  source 1..384: mol_type = other DNA
caggtccagctggtacagtctggggctgaggtgaagaagcctggggcctcagtgaaggtctcctgcaaggtttccggatacaccctcactgaattatccatacactgggtgcgacaggctcctggaaaagggcttgagtggatgggaggttttgatcctgaagatgctgaaacaatctacgcacagaagttccagggcagagtcaccatgaccgaggacacatctacagacacagcctacatggagctgagcagcctgagatctgaggacacggccgtgtattactgtgcagccggtgtagcagtggctggtactaagggcgattactactactactacggtatggacttctggggccaagggaccacggtcaccgtctcctca

SEQ ID NO: 808 - DNA, 322 bp, synthetic construct
  misc_feature 1..322: note = Synthetic
  source 1..322: mol_type = other DNA
gacatccagatgacccagtctccatcctcactgtctgcatctgtaggagacagagtcaccatcacttgtcgggcgagtcagggcattagaaattatttagcctggtttcagcagaaaccagggaaagcccctaagtccctgatctatgctgcatccagtttgcaaagtggggtcccatcaaagttcagcggcagtggatctgggacagatttcactctcaccatcagcagcctgcagcctgaagattttgcaacttattactgccaacagtataatagttaccctcggacgttcggccaagggaccaaggtggaaatcaaac

SEQ ID NO: 809 - DNA, 370 bp, synthetic construct
  misc_feature 1..370: note = Synthetic
  source 1..370: mol_type = other DNA
cagctgcagctgcaggagtcgggcccaggactggtgaagccttcggagaccctgtccctcacctgcactgtctctggtggctccatcagcactaataattacttctggggctggatccgccagcccccagggaaggggctggagtggattgggactgtctattatagtgggagcacctactacaacccgtccctccggagtcgagtcaccatatccgtagacacctccaagaaccacttctccctgaggctgacctctgtgaccgccgcagacacggctgtgtattactgtgcgacatatttcaggggctacaccgttgatgagggattcgacccctggggccagggaaccctggtcaccgtctcctcag

SEQ ID NO: 810 - DNA, 322 bp, synthetic construct
  misc_feature 1..322: note = Synthetic
  source 1..322: mol_type = other DNA
gacatccagatgacccagtctccatcctccctgtctgcatctgtaggagacagagtcaccatcacttgccgggcaagtcagggcattagaaatgatttaggctggtatcagcagaaaccagggaaagcccctaagcgcctgatctatgctgcatccagtttgcaaagtggggtcccatcaaggttcagcggcagtggatctgggacagaattcactctcacaatcagcagcctgcagcctgaagattttgcaacttatttctgtctacagtataatagttaccccctcactttcggcggagggaccaaggtggaaatcaaac

SEQ ID NO: 811 - DNA, 364 bp, synthetic construct
  misc_feature 1..364: note = Synthetic
  source 1..364: mol_type = other DNA
gaggtgcagctggtgcagtccggagcagaggtgaaaaagcccggggagtctctgaggatctcctgtcagggttctggatacggctttaccagctactggatcagctgggtgcgccagatgcccgggaaaggcctggaatggatggggaggattgatcctagtgactcttataccaactacagcccgtccttccaaggccacgtcaccatctcacctgacaagtccatcagcactgcctacctgcagtggagcagcctgaaggcctcggacaccgccatgtattactgtgcgagacatagaactggaacgccgtatgatgcttttgatatctggggccaagggacaatggtcaccgtctcttcag

SEQ ID NO: 812 - DNA, 322 bp, synthetic construct
  misc_feature 1..322: note = Synthetic
  source 1..322: mol_type = other DNA
gacatccagatgacccagtctccatcctccctgtctgcatctgtaggagacagagtcaccatcacttgccaggcgagtcaggacattagcaactatttaaattggtatcagcagaaaccagggaaagcccctaagctcctgatctacgatgcattcaatttggaaacaggggtcccagcaaggttcagtggaagtggatctgggacagattttactttcaccatcagcagcctgcagcctgaggatgttgcaacatattactgtcaacagtatgaaaatgtcgaaatcactttcggccctgggaccaaagtggatatcaaac

SEQ ID NO: 813 - DNA, 382 bp, synthetic construct
  misc_feature 1..382: note = Synthetic
  source 1..382: mol_type = other DNA
caggtgcagctggtggagtctgggggaggcgtggtccagcctgggaggtccctgagactctcctgtgcagcctctggattcatcttcagtaactatggcatgcactgggtccgccaggctccaggcaaggggctggagtgggtggcagttatatcatatgatggaagtaataaatactatgaagactccgtgaagggccgattcaccatctccagagacaattccaagaacacgctgtatctgcaaatgaacagcctgagacctgaggacacggctgtgtattactgtgcgaaagatcgctgggtgggcatacgaagggtcgcccctatttcgggtgggtttgattactggggccagggaaccctggtcaccgtctcctcag

SEQ ID NO: 814 - DNA, 322 bp, synthetic construct
  misc_feature 1..322: note = Synthetic
  source 1..322: mol_type = other DNA
gacatccagatgacccagtctccatcctccctgtctgcatctgtaggagacagagtcaccatcacttgccgggcaagtcagggcattaaaaatgatttaggctggtatcagcagaaaccagggaaagcccctaagcacctgatctatgatgcatccagtttgcaaagtggggtcccatcaaggttcagcggcagtggatctgggacagaattcactctcacaatcagcagcctgcagcctgaagattttgcaacttattactgtctacagcattatagttaccccctcactttcggcggagggaccaaggtggagatcaaac

SEQ ID NO: 815 - DNA, 373 bp, synthetic construct
  misc_feature 1..373: note = Synthetic
  source 1..373: mol_type = other DNA
gaggtgcagctggtggagtctgggggaggcttggtaaagcctggggggtcccttagactctcctgtgcagcctctggattcactttcagtaacgcctggatgagctgggtccgccaggctccagggaaggggctggagtgggttggccgtattaaaagcaaaactgatggtgggacaacagactacgctacacccgtgaaaggcagattcaccatctcaagagatgattcaaaaaccgggctgtatctgcaaatgaacagcctgaaaaccgaggacacagccgtgtattactgtaccacagaaactagtggttacttggaggccgtagcttttgatatctggggccaagggacaatggtcaccgtctcttcag

SEQ ID NO: 816 - DNA, 314 bp, synthetic construct
  misc_feature 1..314: note = Synthetic
  source 1..314: mol_type = other DNA
tcctatgagctgactcagccaccctcggtgtcagtggccccaggaaagacggccaggattacctgtgggggaaacaacattggaagtaaaagtgtgcactggtaccagcagaagccaggccaggcccctgtgctggtcgtctatgatgatagcgaccggccctcagggatccctgagcgattctctggctccaactctgggaacacggccaccctgaccatcagcagggtcgaagccggggatgaggccgactattactgtcaggtgtgggataattgcggggtgttcggcggagggaccaagctgaccgtcct

SEQ ID NO: 817 - DNA, 367 bp, synthetic construct
  misc_feature 1..367: note = Synthetic
  source 1..367: mol_type = other DNA
caggtgcagctggtggagtctgggggaggcgtggtccagcctgggaagtccctgagactctcctgtgcagcctctggattcaccttcagtaactatgctatgcactgggtccgccaggctccaggcaaggggctggagtgggtggcacttatatcatatgatggaaataataaatactacgcagactccgtgaagggccgattcaccatctccagagacaattccaagaacacgctgtatctgcaaatgaacagcctgagagctgaggacacggctgtgtattactgtgcgagagatcacgggtatagtgggagccgctccccattagggtactggggccagggaaccctggtcaccgtctcctcag

SEQ ID NO: 818 - DNA, 322 bp, synthetic construct
  misc_feature 1..322: note = Synthetic
  source 1..322: mol_type = other DNA
gacatccagatgacccagtctccatcctccctgtctgcatctgtaggagacagagtcaccatcacttgccgggcaagtcagagcattagcatctatttaaattggtatcagcagaaaccagggaaagcccctaaactcctgatctatgctgcatccagtttgcaaagtggggtcccatcaaggttcagtggcagtggatctgggacagatttcactctcaccattagcagtctgcaacctgaagattttgcaacttactactgtcaacagagttacagtaccccggggacgttcggccaagggaccaaggtggaaatcaaac

SEQ ID NO: 819 - DNA, 355 bp, synthetic construct
  misc_feature 1..355: note = Synthetic
  source 1..355: mol_type = other DNA
caggtgcagctggtggagtctgggggaggcttggtcaagcctggagggtccctgagactctcctgtgcagcctctggattcacctacagtgactactacatgagttggatccgccaggctccagggaaggggctggagtgggtttcatacattagtactagtggtagtaccatatactacgcagactctgtgaagggccgattcaccatctccagggacaacgccaagaactcactgtatctgcaaatgaacagcctgagagccgaggacacggccgtgtattactgtgcgagagatgggttccgtggggtgcttgactactggggccagggaaccctggtcaccgtctcctcag

SEQ ID NO: 820 - DNA, 331 bp, synthetic construct
  misc_feature 1..331: note = Synthetic
  source 1..331: mol_type = other DNA
cagtctgccctgactcagcctgcctccgtgtctgggtctcctggacagtcgatcaccatctcctgcactggaaccagcagtgatgttgggagttataaccttgtctcctggtaccaacagtacccaggcaaagcccccaaactcatgatttatgagggcagtaagcggccctcaggggtttctaatcgcttctctggctccaagtctggcaacacggcctccctgacaatctctgggctccaggctgaggacgaggctgattattactgctgctcatatgcaggtagtagcacttatgtcttcggaactgggaccaaggtcaccgtcctag

SEQ ID NO: 821 - DNA, 367 bp, synthetic construct
  misc_feature 1..367: note = Synthetic
  source 1..367: mol_type = other DNA
caggtgcagctggtggagtctgggggaggcgtggtccagcctgggaggtccctgagactctcctgtgcagcctctggattcaccttcagtagctatgctatgcactgggtccgccaggctccaggcaaggggctggagtgggtggcagttatatcatatgatggaagtaataaatactacgcagactccgtgaagggccgattcaccatctccagagacaattccaagaacacgctgtatctgcaaatgaacagcctgagagctgaggacacggctgtgtattactgtgcgagaggttacgatattttgactggttatttagcccttgactactggggccagggaaccctggtcaccgtctcctcag

SEQ ID NO: 822 - DNA, 325 bp, synthetic construct
  misc_feature 1..325: note = Synthetic
  source 1..325: mol_type = other DNA
gaaatagtgatgacgcagtctccagccaccctgtctgtgtctccaggggaaagagccaccctctcctgcagggccagtcagagtgttagcagcaacttagcctggtaccagcagaaacctggccaggctcccaggctcctcatctatggtgcatccaccagggccactggtatcccagccaggttcagtggcagtgggtctgggacagagttcactctcaccatcagcagcctgcagtctgaagattttgcagtttattactgtcagcagtataataactggcctccgtacagttttggccaggggaccaagctggagatcaaac

SEQ ID NO: 823 - DNA, 370 bp, synthetic construct
  misc_feature 1..370: note = Synthetic
  source 1..370: mol_type = other DNA
caggtgcagctgcaggagtcgggcccaggactggtgaagccttcacagaccctgtccctcacctgcactgtctctggtggctccatcagcaatggtgattactactggagttggatccgccagcccccagggaagggcctggagtggattgggtacatctattatagtgggagcacctaccacaacccgtccctcaagagtcgagttaccatatcactagacacgtccaagaaccagttctccctgaagctgagctctgtgactgccgcagacacggccgtgtattactgtgccagaggtttcggcagcagctggccctacagctggttcgacccctggggccagggaaccctggtcaccgtctcctcag

SEQ ID NO: 824 - DNA, 328 bp, synthetic construct
  misc_feature 1..328: note = Synthetic
  source 1..328: mol_type = other DNA
tcctatgagctgacacagccaccctcggtgtcagtggccccaggacagacggccaggattacctgtgggggaaacaacattggaagtaaaagtgtgcactggtaccagcagaagccaggccaggcccctgtgttggtcgtcaatgatgatagcgaccggccctcagggatccctgagcgattctctggctccaactctgggaacacggccaccctgaccatcagcagggtcgaagccggggatgaggccgactattactgtcaggtgtgggatagtagtagtgatcattatgttgtgttcggaggaggcacccagctgaccgtcctcg

SEQ ID NO: 825 - DNA, 370 bp, synthetic construct
  misc_feature 1..370: note = Synthetic
  source 1..370: mol_type = other DNA
caggtgcagctgcaggagtcgggcccaggactggtgaagccttcacagaccctgtccctcacctgcactgtctctggtggctccatcagcagtggtgattactactggagttggatccgccagcccccagggaagggcctggagtggattgggtacatctattacagtgggagcacctactacaacccgtccctcaagagtcgagtcaccatgtcagtagacacgtccaagaaccagttctccctgaagctgaggtctgcgactgccgcagacacggccgtgtattactgtgccagagcatccctagccgcatgggactacggtgacttcgaccactggggccagggaaccctggtcaccgtctcctcag

SEQ ID NO: 826 - DNA, 322 bp, synthetic construct
  misc_feature 1..322: note = Synthetic
  source 1..322: mol_type = other DNA
gacatccagatgacccagtctccatcctccctgtctgcatctgtaggagacagagtcaccatcacttgccgggcaagtcagggcattagaaatgatttaggctggtttcagcagataccagggaaagcccctaagcgcctgatctatgctgcatccagtttgcaaagtggggtcccatcaaggttcagcggcagtggatctgggacagaattcactctcacaatcagcagcctgcagcctgaagattttgcaacttattactgtctacagcataatagttacccgctcactttcggcggagggaccaaggtggagatcaaac

SEQ ID NO: 827 - DNA, 367 bp, synthetic construct
  misc_feature 1..367: note = Synthetic
  source 1..367: mol_type = other DNA
caggtccagctggtacagtctggggctgaggtgaagaagcctggggcctcagtgaaggtctcctgcaaggtttccggatacaccctcattgaattatccatgcactgggtgcgacaggctcctggaaaagggcttgagtggatgggaggttttgatcctgaagatgttgcaacaatctacgcacggaagttccagggcagagtcaccatgaccgaggacacatctacagacacagcctacatggaactgagcagcctgagatctgaggacacggccgtgtattactgtgcaacagccttcgcagtggctggcaaacgcgcggcaattgcctactggggccagggaaccctggtcaccgtctcctcag

SEQ ID NO: 828 - DNA, 337 bp, synthetic construct
  misc_feature 1..337: note = Synthetic
  source 1..337: mol_type = other DNA
gatattgtgatgactcagtctccactctccctgcccgtcacccctggagagccggcctccatctcctgcaggtctagtcagagcctcctacatagtaatggatacaactatttggattggtacctgcagaagccagggcagtctccacagctcctgatctatttgggttctgatcgggcctccggggtccctgacaggttcagtggcagtggatcaggcacagattttacactgaaaatcagcagagtggaggctgaggatgttggggtttattactgcatgcaagctctacaaactccccggacgttcggccaagggaccaaggtggaaatcaaac

SEQ ID NO: 829 - DNA, 388 bp, synthetic construct
  misc_feature 1..388: note = Synthetic
  source 1..388: mol_type = other DNA
caggtgcagctggtgcagtctggggctgaggtgaagaagcctggggcctcagtgaaggtctcctgcaaggcttctggatacaccttcaccagttatgatatcaactggttgcgacaggccactggacaagggcttgagtggatgggatggatgaaccctaacagtggtaatagaggctatgcacagaagttccagggcagagtcaccatgaccaggaacacctccgtaagcacagcctacatggagctgagcagcctgagatctgaggacacggccgtgtattactgtgcgagaaccgcgccccaagtacagcttcggtcccggatcccctccctaaactggtacttcgatctctggggccgtggcaccctggtcaccgtctcctcag

SEQ ID NO: 830 - DNA, 322 bp, synthetic construct
  misc_feature 1..322: note = Synthetic
  source 1..322: mol_type = other DNA
gacatccagatgacccagtctccttccaccctgtctgcatctgtaggagacagagtcaccatcacttgccgggccagtcagagtattagtagctggttggcctggtatcagcagaaaccagggaaagcccctaagctcctgatctataaggcgtctagtttagagagtggggtcccatcaaggttcagcggcagtggatctgggacagagttcactctcaccatcagcagcctgcagcctgatgattttgcaacttattactgccaacagtataatagttatccggggacgttcggccaagggaccaaggtggaaatcaaac

SEQ ID NO: 831 - DNA, 355 bp, synthetic construct
  misc_feature 1..355: note = Synthetic
  source 1..355: mol_type = other DNA
gaggtgcagctgttggagtctgggggaggcttggtacagcctggggggtccctgagactctcctgtgcagcctctggattcacctttagcagctatgccatgagctgggtccgccaggctccagggagggggctggagtgggtctcaagtattactacaagtggtggtagcacatactacgcagactccgtgaagggccggttcacaatctccagagacaattccaagaacacgctgtatgtgcaaatgaacagcctgagagccgaggacacggccgtatattactgtgcgaaggaccttgggagctactacggtggctactggggccagggaaccctggtcaccgtctcctcag

SEQ ID NO: 832 - DNA, 325 bp, synthetic construct
  misc_feature 1..325: note = Synthetic
  source 1..325: mol_type = other DNA
gacatccagatgacccagtctccatcctccctgtctgcatctgtaggagacagagtcaccatcacttgccgggcaagtcagggcattagaaatgatttaggctggtatcagcagaaaccagggaaagcccctaagcgcctgatctatgctgcatccagtttgcaaagtggggtcccatccaggttcagcggcagtggatctgggacagaattcactctcacaatcagcagcctgcagcctgaagattttgcaacttattactgtctacagtataatagttaccctcgtgtcactttcggccctgggaccaaagtggatatcaaac

SEQ ID NO: 833 - DNA, 388 bp, synthetic construct
  misc_feature 1..388: note = Synthetic
  source 1..388: mol_type = other DNA
gaggtgcagctggtggagtctgggggaggcctggtcaagcctggggggtccctgagactctcctgtgcagcctctggattcaccttcagtagctataccatgaactgggtccgccaggctccagggaaggggctggagtgggtctcatccattagtagtagtagtagtttcatatactacgcagactcagtgaggggccgaatcaccgtctccagagacaacgccaagaactcactgtttctgcaaatgaacagcctgagagccgaggacacggctctgtattactgtgcgaggaccctgagagacggggattacgatttttggagaggttattatccgaatgcttttgatatctggggccaagggacaatggtcaccgtctcttcag

SEQ ID NO: 834 - DNA, 325 bp, synthetic construct
  misc_feature 1..325: note = Synthetic
  source 1..325: mol_type = other DNA
gaaatagtgatgacgcagtctccagccaccctgtctgtgtctccaggggaaagagccaccctctcctgcagggccagtcagagtgttagcagcaacttagcctggttccagcagaaacctggccaggctcccaggctcctcatctatggtgcatccaccagggccactggtatcccagccaggttcagtggcagtgggtctgggacagagttcactctcaccatcaacagcctccagtctgaagattttgcagtttattactgtcagcagtattataactggcctccgtggacgttcggccaagggaccaaggtggaaatcaaac

SEQ ID NO: 835 - DNA, 361 bp, synthetic construct
  misc_feature 1..361: note = Synthetic
  source 1..361: mol_type = other DNA
caggtgcagctgcaggagtccggctcaggactggtgaagccttcacagaccctgtccctcacctgcgctgtctctggtggctccatcagcagtggtggttactcctggagctggatccggcagccaccagggaagggcctggagtggattgggtccatctatcatagtgggagcacctactacaacccgtccctcaagagtcgagtcaccatatcagtagacaggtccaagaaccagttctccctgaaggtgagctctgtgaccgccgcggacacggccgtgtattactgtgccagaggtccggtgggaactacctgctttgactactggggccagggaaccctggtcaccgtctcctcag

SEQ ID NO: 836 - DNA, 331 bp, synthetic construct
  misc_feature 1..331: note = Synthetic
  source 1..331: mol_type = other DNA
cagactgtggtgactcaggagccatcgttctcagtgtcccctggagggacagtcacactcacttgtggcttgagctctggctcagtctctactagttacttccccagctggtaccagcagaccccaggccaggctccacgcacgctcatctacaacacaaacactcgctcttctggggtccctgatcgcttctctggctccatccttgggaacaaagctgccctcaccgtcacgggggcccaggcagatgatgaatctgattattactgtgtgctatatatgggtgatggcatttgggtgttcggcggagggaccaagctgaccgtcctag

SEQ ID NO: 837 - DNA, 355 bp, synthetic construct
  misc_feature 1..355: note = Synthetic
  source 1..355: mol_type = other DNA
caggtgcagctgcaggagtcgggcccaggactggtgaagccttcggagaccctgtccctcacctgcactgtctctggtggctccatcagtagttactactggagctggatccggcagcccccagggaagggactggagtggattgggtatatctattacagtgggagcaccaactacaacccctccctcaagagtcgagtcaccatatcagtagacacgtccaagaaccagttctccctgaagctgagctctgtgaccgctgcggacacggccgtgtattactgtgcgagaattgttcctaggcgatggtggttcgacccctggggccagggaaccctggtcaccgtctcctcag

SEQ ID NO: 838 - DNA, 337 bp, synthetic construct
  misc_feature 1..337: note = Synthetic
  source 1..337: mol_type = other DNA
cagtctgccctgactcagcctgcctccgtgtctgggtctcctggacagtcgatcaccatctcctgcactggaaccagcagtgatgttgggagttataaccttgtctcctggtaccaacagcacccaggcaaagcccccaaactcatgatttatgagggcagtaagcggccctcaggggtttctaatcgcttctctggctccaagtctggcaacacggcctccctgacaatctctgggctccaggctgaggacgaggctgattattactgctgctcatatgcaggtagtagcactttagatgtggtattcggcggagggaccaagctgaccgtcctag

SEQ ID NO: 839 - DNA, 355 bp, synthetic construct
  misc_feature 1..355: note = Synthetic
  source 1..355: mol_type = other DNA
caggtgcagctgcaggagtcgggcccaggactggtgaagccttcggggaccctgtccctcacctgcgctgtctctggtggctccatcagcagtagtaactggtggagttgggtccgccagcccccagggaaggggctggagtggattggggaaatctatcatagtgggagcaccaactacaacccgtccctcaagagtcgagtcaccatatcagtagacaagtccaagaaccagttctccctgaaactgagctctgtgaccgccgcggacacggccgtgtattactgtgcgaggggttgggggcaactgccgcttgactactggggccagggaaccctggtcaccgtctcctcag

SEQ ID NO: 840 - DNA, 331 bp, synthetic construct
  misc_feature 1..331: note = Synthetic
  source 1..331: mol_type = other DNA
cagtctgccctgactcagcctgcctccgtgtctgggtctcctggacagtcgatcatcatctcctgcattggaaccagcagtgatgttgggagttataaccttgtctcctggtaccaacagcacccaggcaaagcccccaaactcatgatttatgagggcagtaagcggccctcaggggtttctaatcgcttctctggctccaagtctggcaacacggcctccctgacaatctctgggctccaggctgaggacgaggctgattattactgctactcatatgcaggtagtagcacttgggtgttcggcggagggaccaagctgaccgtcctag

SEQ ID NO: 841 - DNA, 391 bp, synthetic construct
  misc_feature 1..391: note = Synthetic
  source 1..391: mol_type = other DNA
cagctgcagctgcaggagtcgggcccaggactggtgaagccttcggagaccctgtccctcacttgcactgtctctggtggctccatcagcagtagtagttactactggggctggatccgccagcccccagggaaggggctggagtggattgggagtatctattatagtgggagcacctactacaacccgtccctcaagagtcgagtcaccatatccgtagacacgtccaagaatcagttctccctgaagctgagctctgtgaccgccgcagacacggctgtgtattactgtgcgagacatggtccgccaatatggtattactatgatagtagtggttacccagatgcttttgatatctggggccaagggacaatggtcaccgtctcttcag

SEQ ID NO: 842 - DNA, 340 bp, synthetic construct
  misc_feature 1..340: note = Synthetic
  source 1..340: mol_type = other DNA
gacatcgtgatgacccagtctccagactccctggctgtgtctctgggcgagagggccaccatcaactgcaagtccagccagagtgttttatacagctccaacaataagaactacttagcttggtaccagcagaaaccaggacagcctcctaagctgctcatttactgggcatctacccgggaatccggggtccctgaccgattcagtggcagcgggtctgggacagatttcactctcaccatcagcagcctgcaggctgaagatgtggcagtttattactgtcagcaatattatagtactccgtacacttttggccaggggaccaagctggagatcaaac

SEQ ID NO: 843 - DNA, 364 bp, synthetic construct
  misc_feature 1..364: note = Synthetic
  source 1..364: mol_type = other DNA
caggtccagctggtacagtctggggctgaggtgaagaagcctggggcctcagtgaaggtctcctgcaaggtttccggatacaccctcattgaattagccatacactgggtgcgacaggctcctggaaaagggcttgagtggatgggaggttttgatcctgaagatgttgaaattatctatgcacagaagttccagggcagagccaccatgaccgaggacacatctacagacacagcctacatggagctgcgcggcctgagatctgaggacacggccgtgtattactgtggaacacattatgcagtagctggaaggcgactcgttgactactggggccagggaaccctggtcaccgtctcctcag

SEQ ID NO: 844 - DNA, 329 bp, synthetic construct
  misc_feature 1..329: note = Synthetic
  source 1..329: mol_type = other DNA
cagtttgtgctgactcagccgccctcagtgtctgcggccccaggacagaaggtcaccatctcctgctctggaagcaactccaacattgggaataattatgtatcctggtaccagcagctcccaggaacagcccccaaactcctcatctatgaaaataataagcgaccctcaggcattcctgaccgattctctggctccaagtctggcacgtcagccaccctgggcatcaccggactccagactggggacgaggccgattattactgcggaacatgggatagtagcctgaatattggggtgttcggcggagggaccaagctgaccgtcct

SEQ ID NO: 845 - DNA, 370 bp, synthetic construct
  misc_feature 1..370: note = Synthetic
  source 1..370: mol_type = other DNA
cagctgcagctgcaggagtcgggcccaggactggtgaagccttcggagaccctgtccctcacctgcactgtgtctggtggctccatcagcagtagaagttactactggggctggatccgccagcccccagggaagcgactggagtgggttgggagtatcttttatactggcagcaccttctacaacccgtccctcgagagtcgactcaccatatccattgacacgcccgagaagaagatctccctgaggctgacctctgtgaccgccgcagacacggcactttattattgtgcgttctatgaagtgggctatagtaatgactatggattcgacccctggggccagggaaccctggtcaccgtctcctcag

SEQ ID NO: 846 - DNA, 322 bp, synthetic construct
  misc_feature 1..322: note = Synthetic
  source 1..322: mol_type = other DNA
gacatccagatgacccagtctccatcctccctgtctgcatctgtaggagacagagtcaccatcacttgccgggcaagtcaggacattagaaatgatttaggctggtatcagcagaaaccagggaaagcccctaagcgcctgatctatggtgcatccagtttgcaaaatggggtcccatcaaggttcagcggcagtggatctgggacagaattcagtctcacaatcagcagcctgcagcctgaagattttacaacttatttctgtctacagtataatagttaccctctcactttcggcggagggaccaaggtggagatcaaac

SEQ ID NO: 847 - DNA, 384 bp, synthetic construct
  misc_feature 1..384: note = Synthetic
  source 1..384: mol_type = other DNA
caggtccagctggtacagtctgggcctgaggtgaagaagcctggggcctcagtgaaggtctcctgcaaggtttccggatataccctcactgaattgtccatacactgggtgcgacaggctcctggaaaagggcttgagtggatgggaggttttgatcctgaagatgctgaaacaatctacgcacagaagttccagggcagagtcaccatgaccgaggacacatctacagacacagcctacatggagctgagcagcctgagatctgaggacacggccgtgtattactgtgcagccgcttttgcagtggctggtactaaggaagattactcctactactacggtatggacgtctggggccaagggaccacggtcaccgtctcctca

SEQ ID NO: 848 - DNA, 318 bp, synthetic construct
  misc_feature 1..318: note = Synthetic
  source 1..318: mol_type = other DNA
gacatccagatgacccagtctccatcctcactgtctgcatctgtaggagacagagtcaccatcacttgtcgggcgagtcagggcattagcaattatttagcctggtttcagcagaaaccagggaaagcccctaagtccctgatctatgctgcatccagtttgcaaagtggggtcccatcaaggttcagcggcagtggatctgggacagatttcactctcaccatcagcagcctgcagcctgaagattttgcaacttattactgccaacagtataatagttaccctcggacgttcggccaagggaccaaggtggaaatc

SEQ ID NO: 849 - DNA, 370 bp, synthetic construct
  misc_feature 1..370: note = Synthetic
  source 1..370: mol_type = other DNA
cagctgcagctgcaggagtcgggcccaggactggtgaagacttcggagaccctatccctcacgtgcactgtctctggtggctccatcagtagtacttattactactgggactggatccgccagcccccagggaaggggctggagtggattgggtcaatacattatgctgggaccacctaccacaatccgtccctcaacagtcgagtcaccatatccgttgacacgtccaagaaccagttctccctgaaattgagctctgtgaatgccgcagacacggctgtgtattattgtgcgacgtatatcaggggctacagtgttgatgaggggttcgacccctggggccagggaaccctggtcaccgtctcctcag

SEQ ID NO: 850 - DNA, 322 bp, synthetic construct
  misc_feature 1..322: note = Synthetic
  source 1..322: mol_type = other DNA
gacatccagatgacccagtctccatcctccctgcctgcatctgtaggagacagagtcaccttcacttgccgggcaagtcagggcattaataatgatgtaggctggtatcagcagaaaccagggaaggcccctaagcgcctgatctatgctgcatccagtttgcaaagtggggtcccatcacggttcagcggcagtggatctgggagagaattcattctcacaatcagcagcctgcagcctgaagactttgcaacttattactgcctacagtataacagttaccccatcactttcggcggagggaccaaggtggagatcaaac

SEQ ID NO: 851 - DNA, 358 bp, synthetic construct
  misc_feature 1..358: note = Synthetic
  source 1..358: mol_type = other DNA
caggtgcagctacagcagtggggcgcaggactgttgaagccttcggagaccctgtccctcacctgcgctgtcgatggtgggcacttcattggtttctactggagttggatccgcctgcccccagggaaggggctggaatggattggggaaatcgaccatagtggaggcaccacctacaagccgtccctcaagagtcgagtgaccatgtcagtggacaagtcgaagaaggagttttacctgaagctgacctctgtgaccgccgcggacacggcagtctattactgtgcgagaggggtagcagtgactggtacgcactttgactactggggccagggaaccctggtcaccgtctcctcag

SEQ ID NO: 852 - DNA, 320 bp, synthetic construct
  misc_feature 1..320: note = Synthetic
  source 1..320: mol_type = other DNA
gacatccagatgacccagtctccatcttccgtgtctgcatctgtaggagacagagtcaccatcacttgtcgggcgagtccggctattagcaggtggttagcctggtatcagcagaaaccagggcaagcccctaaactcctgatctatgctgcatccagtttacaaagtggggtcccctcaaggttcagcggcagtggatctgggacagatttcactctcaccattagcagcctgcagcctgaagattttgctacttactattgtcaacaggccacctatgtcccgtggacgttcggccaagggaccaaggtggaaatcaa

SEQ ID NO: 853 - DNA, 385 bp, synthetic construct
  misc_feature 1..385: note = Synthetic
  source 1..385: mol_type = other DNA
caggttcagctggtgcagtctggaggtgaggtgaagaggcctggggcctcagtgaaggtctcctgcaaggcttctggttacacctttaccacctacggtatcagctgggtgcgacaggcccctggacaagggcttgagtggatgggatggatcagcccttacaatagtcacacaaactatgcacagagactccaggacagagtcaccatgaccacagacacatccacgagcacagtgtacttggagctgaggaaccttagatctgacgacacggccgtctattactgtgcgagagatcttctcactgtactcatggcccatacaataccggcccgaagttggttcgactcctggggccagggaaccctggtcaccgtctcctcag

SEQ ID NO: 854 - DNA, 322 bp, synthetic construct
  misc_feature 1..322: note = Synthetic
  source 1..322: mol_type = other DNA
gacatccagatgacccagtctccttccaccctgtctgcaactgtaggagacagagtcaccatcacttgccgggccagtcagagtattagtaagtggttggcctggtatcagcagaaaccagggaaagcccctaaggtcctgatctataaggcgtctagtttagaaagtggggtcccatcaaggttcagcggcagtggatctgggacagaattcactctcaccatcagcagcctgcagcctgatgatgctgcgacttattactgtcaacagtataaaagtaatgaggacacttttggccaggggaccaagctggagatcaaac

SEQ ID NO: 855 - DNA, 390 bp, synthetic construct
  misc_feature 1..390: note = Synthetic
  source 1..390: mol_type = other DNA
gaggtgcagctggtggagtctgggggaggcctggtcaagccgggggggtccctgagactctcctgtgtcgcctccacattcaccttcagtaattataacatgaattgggtccgccagactccagggagggggctggagtgggtctcatccattagtagtaggagtaattacatatactacgtagactcagtgaagggccgattcaccatctccagagacaacgccaagaactcactgtatctgcaaatgaacagcctgagagccgaggacacggctgtgtattactgtgcgagaggtaaccatggtccggggagttactatagacttggagactactactattacggtatggacgtctggggccaagggaccacggtcaccgtctcctca

SEQ ID NO: 856 - DNA, 325 bp, synthetic construct
  misc_feature 1..325: note = Synthetic
  source 1..325: mol_type = other DNA
gaaatagtgatgacgcagtctccagccaccctgtctgtgtctccaggggaaagagccaccctctcctgcagggccagtcagagtgttagcagcaacttagcctggtaccagcagaaacctggccaggctcccaggctcctcatctatgagacatccaccagggccactgatatcccagccaggttcagtggcagtgggtctggtacagagttcactctcaccatcagcagcctgcagtctgaagattctgcagtttattactgtcagcagtatcataactggcctccgtggacgttcggccaagggaccaaggtggaaatcaaac

SEQ ID NO: 857 - DNA, 383 bp, synthetic construct
  misc_feature 1..383: note = Synthetic
  source 1..383: mol_type = other DNA
caggtccagctggtacagtctggggctgaggtgaagaagcctggggcctcagtgacggtctcctgcaaggtttccctatattcacttagtgagttatccatacactgggtgcgacaggctcctggaaaagggcttgagtggatgggaggttttgatccagaagctgcgaaaaccatctacgcacggaacttccagggcagagtcaccatgaccgaggactcatctgcagacacagcctacatggagttgagcagtttgagatctgaggacacggccatttattactgtgtaacagccacagctgtgtctgggacgaggacgaattatcagtatcattatggtctggacgtctggggccaggggaccacggtcaccgtctcctc

SEQ ID NO: 858 - DNA, 337 bp, synthetic construct
  misc_feature 1..337: note = Synthetic
  source 1..337: mol_type = other DNA
gatattgtgatgacccagactccactctcctcgcctgtcacccttggacagccggcctccatctcctgcaggtctaatcaaagtctcgttcacagtgatggagacacttacttgagttggcttcaccagaggccaggccagcctccaagagtcctaatttataagatttttaaccgcttctctggggtcccagacagattcagtggcagtggggcagggacagatttcacactgaaaatcagcagggtggaagctgaggatgtcggggtttattactgcatgcaagctacacagttcccattcactttcggccctgggaccaaagtggatatcaaac

SEQ ID NO: 859 - DNA, 382 bp, synthetic construct
  misc_feature 1..382: note = Synthetic
  source 1..382: mol_type = other DNA
gaggtgcagctggtggagtctgggggaggcctcgtcaagcctggggggtccctgagattgtcctgtgcagtctctggattcaccttcagtaactataacatgaactgggtccgccaggctccagggaaggggctggagtgggtctcatccattagtcgtagttctagttacatatacctcgcagaatcagtgaagggccgattcaccatctccagagacaacgccaagaactcactgtatctgcaaatgaacagcctgagagccgaggacacggctgtgtattactgtgtgagagaaacttcccctcacgatctttggaaaggttattacgggggctactttgacttctggggccagggaaccctggtcaccgtctcgtcag

SEQ ID NO: 860 - DNA, 325 bp, synthetic construct
  misc_feature 1..325: note = Synthetic
  source 1..325: mol_type = other DNA
gaaatagtgatgacgcagtctccagccaccctgtctgtgtctccaggggaaagggccaccttttcttgcagggccagtcagagtgttagcagcgacttagcctggttccagcagaaacctggccaggctcccaggctcctcatctatggtgcatccaccagggccactggtatcccagccaggttcggtggcagtgggtctgggacagagttcactctcaccatcagcagcctgcagtctgaagattttgcagtttattactgtcagcagtatcataactggcctccgaggacgttcggccaagggaccaaggtggaaatcaaac

SEQ ID NO: 861 - DNA, 382 bp, synthetic construct
  misc_feature 1..382: note = Synthetic
  source 1..382: mol_type = other DNA
gaggtgcagctggtggagtctgggggaggcctggtcaagcctggggggtccctaaggctctcctgtgcagcctctggattcaccttcagtagttatagcatgaactgggtccgccaggctccagggaaagggctggagtgggtctcatccattagtggtcgtagtaatttcatatattacacagactcagtgaagggccgattcaccatctccagagacaacgccaagaattcactgtatctgcaaatgaacagcctgagagccgaagacacggctgtctattactgtgcgagagttctaaagccccactatgacagtagtggttattacgaaaaaatatctgactactggggccagggaaccctggtcaccgtctcctcag

SEQ ID NO: 862 - DNA, 325 bp, synthetic construct
  misc_feature 1..325: note = Synthetic
  source 1..325: mol_type = other DNA
gaaatagtgatgacgcagtctccagccaccctgtctgtgtctccaggggaaagagccaccctctcctgcagggccagtcagagtattagcagcaacttagcctggtaccagcagaaacctggccaggctcccagactcctcatctatgatgtatccaccagggccactggtttcccagccaggttcagtggcagtggctctgggacagagttcactctcaccatcagcagcctgcaatctgaagattctgcagtttattactgtcagcagtatcataactggcctccgtacacttttggccaggggaccaagctggagatcaaac

SEQ ID NO: 863 - DNA, 368 bp, synthetic construct
  misc_feature 1..368: note = Synthetic
  source 1..368: mol_type = other DNA
caggtgcagctgcaggagtcgggcccaggactggtgaagccttcacagaccctgtccctcatttgcgctgtctctggtggctccatcagcagtaatgattactactggagttgggtccgccagcccccagggaagggcctggagtggatggggaacatcttttatagtgggataacctactacaatccgtccctcaacagtcgacttaccatgtcagtggacacgtccaagaaccagttctacctgaagctgagctctgtgactgccgcagacacggccatttatttctgtgccagatatgttgtgaactactcgagggatgatggctttgatatctggggccaagggacaatggtcaccgtctcttc

SEQ ID NO: 864 - DNA, 322 bp, synthetic construct
  misc_feature 1..322: note = Synthetic
  source 1..322: mol_type = other DNA
gacatccagatgacccagtctccttcctccctgtctgcttctgtaggggacagagtcaccttcacttgccgggcaagtcaggacattagaaatgatttaggctggtatcagcagaaaccaggaaaagcccctaagcgcctgatctatggtgcaaccagtttacaaagtggggtcccatcaaggttcagcggcagtggatctgggacagagttcactctcacaatcagcagcctgcagcctgaagattttgcaacttatttctgtctacagtataatacctaccccattaccttcggccaagggacacgactggagattaaac

SEQ ID NO: 865 - DNA, 390 bp, synthetic construct
  misc_feature 1..390: note = Synthetic
  source 1..390: mol_type = other DNA
caggtgcagctgcaggagtcgggcccaggactggtgaagccttcacagaccctgtccctcacctgcactgtctctggtggctccatcatcagtggtgattactactggacttggatccgccagcccccagggaagggcctggagtggatcgggtacatcttttacagtgggaccacccactacaacccgtccctcaagagtcgacttaccatgtcagtagacacgtccaagaagcagttttccctgaggctgagctctgtgactgccgctgacacggccgtctattattgtgccagagaaacaagatattgtagtggcgcgagctgctctgggggctaccactacggtatggacgtctggggccaagggatcacggtcaccgtctcctca

SEQ ID NO: 866 - DNA, 325 bp, synthetic construct
  misc_feature 1..325: note = Synthetic
  source 1..325: mol_type = other DNA
gaaatagtgatgacgcagtctccagccaccctgtctgtgtctcctggggaaagagccaccctctcctgcagggccagtcagagtgttagcagcaacttagcctggtaccagcagaaacctggccaggctcccaggctcctcatctatggtgcatccaccagggccactggtatcccagccaggttcagtggcagtgggtctgggacagagttcactctcaccatcagcagcctgcagtctgaagattttgcagtttattactgtcagcagtctaataactggcctccgtggacgttcggccaagggaccaaggtggagatcaaac

SEQ ID NO: 867 - DNA, 358 bp, synthetic construct
  misc_feature 1..358: note = Synthetic
  source 1..358: mol_type = other DNA
caggtgcagctgcaggagtcgggcccaggactggtgaagccttcggggaccctgtccctcacctgcggtgtctctggtgtctccatcagcactactaactggtggacttgggtccgccagcccccagggaaggggctggagtggattggggaaatttatcatagtgaaaacaccaactacaacccgtccctcaagagtcgagtcaccatgtcagtggacaagtccaagaaccagatctccctgaagctgaactctgtgaccgccgcggacacggccatttattattgtgcgagacgttactatggttcggggagttttgactactggggccagggaaccctggtcaccgtctcctcag

SEQ ID NO: 868 - DNA, 331 bp, synthetic construct
  misc_feature 1..331: note = Synthetic
  source 1..331: mol_type = other DNA
cagtctgccctgactcagcctgcctccgtgtctgggtctcctggacagtcgatcaccatctcctgcactggaaccaccagtgatgttgggagttataaccttgtctcctggtaccaacagcacccaggcaaagcccccaaactcctgatttatgagggcagtaagcggccctcaggggtttctaatcgcttctctggctccaagtctggcaacacggcctccctgacaatctctgggctccaggctgaggacgaggctgattattactgcttctcatatgcaggttttagcacttgggtgttcggcggagggaccaagctgaccgtcctag

SEQ ID NO: 869 - DNA, 354 bp, synthetic construct
  misc_feature 1..354: note = Synthetic
  source 1..354: mol_type = other DNA
caggtgcagctgcaggagtcgggcccaggactggtgaagccctcggggaccctgtccctcacctgcgctgtctctggtggctccatcagcagtaataactggtggggttgggtccgccagcccccagagaaggggctggagtggattggggatgtctatcatagtggcaacaccaactacaacccgtccctcaagagtcgagtcaccatatcactagacaagtccaagaaccagttctccctgaagctgacctctgtgaccgccgcggacacggccgtgtattactgtgccagagaccgattggtggctacagggtttgaccactggggccagggagccctggtcaccgtctcc

SEQ ID NO: 870 - DNA, 331 bp, synthetic construct
  misc_feature 1..331: note = Synthetic
  source 1..331: mol_type = other DNA
cagtctgccctgactcagcctgcctccgtgtctgggtctcctggacagtcgatcaccatctcctgcactggaaccagcagtgatgttggcagttataaccttgtctcctggtaccaacagcaccctggcaaagcccccaaactcatgatttatgaggccgttaagcggccctcaggggtttctaatcgcttctctggctccaagtccggcaacacggccaccctgacaatctctgggctccaggctgaggacgaggctgattattactgctactcatatgcaggaagtagtacgagggtcttcggaactgggaccaaggtcaccgtcctag

SEQ ID NO: 871 - DNA, 372 bp, synthetic construct
  misc_feature 1..372: note = Synthetic
  source 1..372: mol_type = other DNA
caggttcagctggtgcagtctggagctgaggtgaagaagcctggggcctcagtgaaggtctcctgcaaggcttctggttacacctttagcagctatggtatcagctgggtgcgacaggcccctggacaagggcttgagtggatgggatggaccagcacttactatgataacaagaattacgcacagaaatttcaggacagactcaccatgaccacagacacatccacgaacacagcctacatggagctgaggagcctgagatctgacgacgcggccgtgtattactgtgcgagagttgcagcagctgaaatttactactactactactgtatggacgtctggggccaggggaccacggtcaccgtctcctca

SEQ ID NO: 872 - DNA, 322 bp, synthetic construct
  misc_feature 1..322: note = Synthetic
  source 1..322: mol_type = other DNA
gacatccagttgacccagtctccatccttcctgtctacatctgtaggagacagagtcaccatcacttgccgggccagtcagggcattaacagtcatttagcctggtatcaacaaaaaccagggaaagcccctaacctcctgatctatgatgcatccactttgcaaagtggggtcccgtcaaggttcaacggcagtggatctgggacagaattcgctctcacaatcagcagcctgcagcctgaagattttgcaacttattactgtcaacaacttaatagttacccgatcaccttcggccaagggacacgactggagattaaac

SEQ ID NO: 873 - DNA, 378 bp, synthetic construct
  misc_feature 1..378: note = Synthetic
  source 1..378: mol_type = other DNA
gaggtgcagctggtggagtctgggggaggcttggtaaagccgggggggtcccttagactctcctgtgcagcctcaggattgatcttcagtgacgcctggatgagttgggtccgccaggctccagggaaggggctggagtgggttggccgtattaaaagtaaaactgatggtgcgacaacagagtacggtgcacccgtgaaaggcagattcaccatctcaagagatgattcaaaaaacacgctgtacttgcaaatgaacagcctgaaaatcgaggacacagccgtgtattattgtaccgtagacgggttgggagccacttggtactactacttcgctatggacgtctggggccaagggaccacggtcaccgtctcctca

SEQ ID NO: 874 - DNA, 331 bp, synthetic construct
  misc_feature 1..331: note = Synthetic
  source 1..331: mol_type = other DNA
caggctgtggtgactcaggagccctcgctgactgtgtccccaggagggacagtcactctcacctgtgcctccagcactggagctgtcaccagtggtcattatccctactggttccaacagaagcctggccaggcccccaggacactgatttatgatacaaacaacaaacattcctggacacctgcccggttctcaggctccctccttgggggcagagctgccctgaccctttcgggtgcgcagcctgatgatgaggctgactattattgcttgctctcctatagtcgtgctcggccggttttcggcggagggaccaagttgaccgtcttag

SEQ ID NO: 875 - DNA, 376 bp, synthetic construct
  misc_feature 1..376: note = Synthetic
  source 1..376: mol_type = other DNA
cagctgcagctgcaggagtcgggcccaggactggtgaagccttcggagaccctgtccctcacctgcactgtctctggcggctccatcatcagtggtagttactactggggctggatccgccagcccccagggaaggggctggagtggattggaagtatcttttatagtgggagcacctactacaacccgtccctcaagagccgagtcaccatgtccgtggacacgtccaagaaccacttctccctgaagctgagttctgtgaccgccgcagacacggctgtttattactgtgcgagacttaattctggggaaggctacgctaatctgggcgtcgcggactcctggggccagggaaccctggtcaccgtctcctcag

SEQ ID NO: 876 - DNA, 322 bp, synthetic construct
  misc_feature 1..322: note = Synthetic
  source 1..322: mol_type = other DNA
gacatccagatgacccagtctccatcctccctgtctgcatctgtaggagacagagtcaccatcacttgccgggcaagtcagggcattagaaatgatttaggctggtatcagcagaaaccagggaaagcccctaagcgcctgatctatgctgcatccagtttgcaaagtggggtcccatcaaggttcagcggcagtggatctgggacagaatttactctcacaatcagcagcctgcagcctgaagattttgcaacttattactgtctacagcataatagttacccgctcactttcggcggagggaccaaggtggagatcaaac

SEQ ID NO: 877 - DNA, 373 bp, synthetic construct
  misc_feature 1..373: note = Synthetic
  source 1..373: mol_type = other DNA
gaagtgcagctggtggagtctggggggggcttggtacagcctggcaggtccctcagactctcctgtgcagcctctggattcaactttgatgattatgccattcactgggtccggcaagctccagggaagggcctggagtgggtctcagttattagttacaatagtgccagtaaagcctatgcggactttgtgaagggccgattcaccatctccagagacaacgccaagaactccctgtatctgcaaatgaacagtctgagagttgaggacacggccttatattactgtgtaaaagatatgacgcaccgtgcgatttttggagtgggcccctttgaccgctggggccagggaaccctggtcaccgtctcctcag

SEQ ID NO: 878 - DNA, 322 bp, synthetic construct
  misc_feature 1..322: note = Synthetic
  source 1..322: mol_type = other DNA
gacatccagttgacccagtctccatccttcctgtctgcctctgtaggagacagagtcaccatcacttgccgggccagtcagggcattagcagtaatttagcctggtctcagcaaaaaccagggaaagcccctaagctcctgatctatgctgcatccactttgcaaactggggtctcagcaaggttcagcggcagtggatctgggacagagttcactctcacaatcagcagcctgcagcctgaagattttgcaacttattactgtcaacagcttaatacttaccctctcactttcggcggagggaccaaggtggaaatcaaac

SEQ ID NO: 879 - DNA, 370 bp, synthetic construct
  misc_feature 1..370: note = Synthetic
  source 1..370: mol_type = other DNA
gaagtgcagctggtggagtctgggggaggcttggtacagcctggcaggtccctgagactctcctgtgcagcctctggattcagctttgaaaattatgccatacactgggtccggcaagctccagggaagggcctggagtgggtctcagttattagttggaatagtggaagcgttgcctatgcggactctgtgaagggccgattcaccatctccagagacaacgccaagaagaccctgtatctgcaaatgaacagtctgagacctgaggacacggccgtgtattactgtgcaagagatatagactctatggtgaccccaggaagtcgtctcgacccctggggccagggaaccctggtcaccgtctcctcag

SEQ ID NO: 880 - DNA, 319 bp, synthetic construct
  misc_feature 1..319: note = Synthetic
  source 1..319: mol_type = other DNA
tcctatgagctgacacagccaccctcagtgtccgtgttcccaggacagacagccaccatcacctgctctggagataaattgggggatgaatatactttctggtatcaacagaagccaggccagtcccctgtgctggtcatctatctagataccaagcggccctcagggatccctgagcgattttctggctccaactctgggaacacagccactctgaccatcagcgggacccaggctatggatgaggctgactattactgtcaggcgtgggacagcagagttgtggttttcggcggagggaccaagctgaccgtcctag

SEQ ID NO: 881 - DNA, 373 bp, synthetic construct
  misc_feature 1..373: note = Synthetic
  source 1..373: mol_type = other DNA
caggtgcagctgcaggagtcgggcccaggactggtgaagccttcacagaccctgtccctcacctgcattgtctctggtgactccatcagcggtggtgattactactggagttggatccgccagcccccagggaagggcctggagtggattgggtacatctatcacagtgggaatacctactacaacttgtccctcaggagtcgagtgaccatatcactggacacgtccaagaaccagttctccctgaagctgagctctgtggctgccgcagacacggccgtgtattactgtgccagaggacttacgatttttggagtgattggggactactttgactcctggggcccgggaaccctggtcaccgtctcctcag

SEQ ID NO: 882 - DNA, 326 bp, synthetic construct
  misc_feature 1..326: note = Synthetic
  source 1..326: mol_type = other DNA
gaaattgtgttgacacagtctccagccaccctgtctttgtgtccaggggaaagagccaccctctcctgcagggccagtcagagttttaatacctacttagcctggtatcaacagaaacctggccaggttctcagcctcctcatctatgatgcatccaaaagggccactggcatcccagacaggttcagtggcagtgggtctgggacagacttcactctcaccatcagcagcctagagcctgaggattctgcagtttattactgtcagcagcgtaccggctggcctccggcgatcaccttcggccaagggacacgactggagattaa

SEQ ID NO: 883 - DNA, 370 bp, synthetic construct
  misc_feature 1..370: note = Synthetic
  source 1..370: mol_type = other DNA
caggtgcagctggtggagtctgggggaggcgtggtccagcctgggaggtccgtgagactctcctgcgcagcgtctggattcaccttcagtaactatggcatgcactggttccgccaggctccaggcaaggggctggagtgggtggcagttatatggtatgatggaagtaatgaagactatggagactccgtgaggggccgattcaccatctccagagacaataccaagaggatgttgtttctgcaaatgaacagcctgagagacgacgacacggctgtctattactgtgcaagaggaacctgtgtaggaacctgcgatccccagaaatttgactactggggtcagggaaccctggtcaccgtctcctcag

SEQ ID NO: 884 - DNA, 320 bp, synthetic construct
  misc_feature 1..320: note = Synthetic
  source 1..320: mol_type = other DNA
gacatccagatgacccagtctccatcctccctgtctgtatctgtcggagacagagtcaccatcacttgccgggcgagtcaggacattagcgactatttaatttggtttcagcagaaaccagggaaagcccctaaactcctgatctacgatgcatccactttggcgagaggtgtcccatcaaggttcagtggaggtggatctgggacagattttactttcaccatcaacagcctgcagcctgaagattttgcaacatattactgtcaacagtatgataatctcccactcactttcggcggagggaccaaggtggaaatcaa

SEQ ID NO: 885 - DNA, 369 bp, synthetic construct
  misc_feature 1..369: note = Synthetic
  source 1..369: mol_type = other DNA
caggtgcagctggtggagtctgggggaggcgtggtccagcctgggaggtccctgagactctcctgtgcagcctctggtttcaccttcagtgtctatggcatacactgggtccgccaggctccaggcaaggggctggagtggttggcaattatatcatatgatggaggtaataaatattatgcagactccgtgaagggccgattcaccatctccagagacaattccaagaacacggtgtatctgcaaatgaacagcctgagagctgaagacacggctgtgtatttctgtgcgaaagttcgttatggctaccgctactcctactacggtatggacgtctggggccaagggaccacggtcaccgtctcctca

SEQ ID NO: 886 - DNA, 322 bp, synthetic construct
  misc_feature 1..322: note = Synthetic
  source 1..322: mol_type = other DNA
gacatccagatgacccagtctccatcctccctgtctgcatctgtaggagacagagtcaccatcacttgccaggcgagtcaggacataaagaactatttaaattggtatcagcagaaaccagggaaagtccctaagctcctgatctacgatgcatccaatttggaaatgggggtcccatttaggttcagtggaagtggttctgggacagatttttctttcaccatcatcagcctgcagcctgaagatattgcaacatattactgtcaacagtatgataatctcccgtctagttttggccaggggaccaagctggagatcaaac

SEQ ID NO: 887 - DNA, 370 bp, synthetic construct
  misc_feature 1..370: note = Synthetic
  source 1..370: mol_type = other DNA
cagctgcagctgcaggagtcgggcccaggactggtgaagccttcggagaccctgtccctcacctgcactgtctctggtggctccatcagcagtagtagttactactggggctggatccgccagcccccagggaaggggctggagtggattgggaatatccattatagtgggagcacctactacaacccgtccctcaagagtcgagtcaccatatccgtagacacgtccaagaaccagttctccctgaagctgagctctgtgaccgccgcagacacggctgtgtattactgtgctccgtacttttctggatacagttatgatgaagcttttgatatctggggccaagggacaatggtcaccgtctcttcag

SEQ ID NO: 888 - DNA, 322 bp, synthetic construct
  misc_feature 1..322: note = Synthetic
  source 1..322: mol_type = other DNA
gacatccagatgacccagtctccatcctccctgtctgcatctgtaggagacagagtcaccatcacttgccgggcaagtcagggcattagaaatgatttaggctggtatcagcagaaaccagggaaagcccctaagcgcctgatctatgctgcatccagtttgcaaagtggggtcccatcaaggttcagcggcagtggatctgggacagaattcactctcacaatcaacagcctgcagcctgaagattttgcaacctattactgtctacagtataatagttaccctctcactttcggcggagggaccaaggtggaaatcaaac

SEQ ID NO: 889 - DNA, 364 bp, synthetic construct
  misc_feature 1..364: note = Synthetic
  source 1..364: mol_type = other DNA
caggtgcagctggtggagtctgggggaggcgtggtccagcctgggaggtccctgagactctcctgtgcagcgtctggattcaccttcagtagctatggcatgcactgggtccgccaggctccaggcaaggggctggagtgggtggcagttatatggtttgatggaagtaataaatactatgcagactccgtgaagggccgattcaccatctccagagactattccaagaacacgctgtatctgcaaatgaacagcctgagagccgaggacacggctgtgtattactgtgcgagaaatggtggatatagtggctacgcccaccttaactactggggccagggaaccctggtcaccgtctcctcag

SEQ ID NO: 890 - DNA, 328 bp, synthetic construct
  misc_feature 1..328: note = Synthetic
  source 1..328: mol_type = other DNA
gaaattgtgttgacgcagtctccaggcaccctgtctttgtctccaggggaaagagccaccctctcctgcagggccagtcagagtgttcccagcagctacttagcctggtaccagcagaaacctggccaggctcccaggctcctcatctatggtgcatccagcagggccactggcatcccagacaggttcagtggcagtgggtctgggacagacttcactctcaccatcagcagactggagcctgaagattttgcagtgtattactgtcagcagtatggtagctcacctacgtggacgttcggccaagggaccaaggtggaaatcaaac

SEQ ID NO: 891 - DNA, 367 bp, synthetic construct
  misc_feature 1..367: note = Synthetic
  source 1..367: mol_type = other DNA
caggttcagctggtgcagtctggagctgaggtgaagaagcctggggcctcagtgaaggtctcctgcaaggcttctggttacatctttaccagctacggtatcagctgggtgcgacaggcccctggacaagggcttgagtggatgggatggatcagcacttacaatagtaacacaaactatgcacagaagctccagggcagagtcaccatgaccacagacacatccacgagcacagcctacatggagctgaggagcctgagatctgacgacacggccgtgtattactgtgcgagagattttggatacagctatggtcgtgatgcttttgatatctggggccaagggacaatggtcaccgtctcttcag

SEQ ID NO: 892 - DNA, 334 bp, synthetic construct
  misc_feature 1..334: note = Synthetic
  source 1..334: mol_type = other DNA
cagtctgtgctgactcagccgccctcagtgtctggggccccagggcagagggtcaccatctcctgcactgggagcagactcagcatcggggcaggttatgatgtacactggtaccagcagcttccaggaacggcccccaaactcctcatctatggtaacaactatcggccctcaggggtccctgaccgattctctggctccaagtctggcacctcagcctccctggccatcactgggctccaggctgaggatgaggctgattattactgccagtcctatgacagcagcctgagtggttgggtgttcggcggagggaccaagctgaccgtcctag

SEQ ID NO: 893 - DNA, 382 bp, synthetic construct
  misc_feature 1..382: note = Synthetic
  source 1..382: mol_type = other DNA
gaggtgcagctggtggagtctgggggaggcctggtcaagcctggggggtccctgagactctcctgtgcagcctctggattcaccttcagtagctatagcatgaactgggtccgccaggctccagggaaggggctggagtgggtctcatccattagtagtagtcgtagttacatatactacgcagactcagtgaagggccgattcaccatctccagagacaacgccgagaactcactgtatctgcaaatgaacagcctgagagccgaggacacggctgtgtattactgtgcgagagtaaaggcgcattactatgatagtagtggttattacccaaactacattgactactggggccagggaaccctggtcaccgtctcctcag

SEQ ID NO: 894 - DNA, 325 bp, synthetic construct
  misc_feature 1..325: note = Synthetic
  source 1..325: mol_type = other DNA
gaaatagtgatgacgcagtctccagccaccctgtctgtgtctccaggggaaagagccaccctctcctgcagggccagtcagagtgttagcagcaacttagcctggtaccaacaaaaacctggccaggctcccaggctcctcatctatggtgcatccaccagggccactggtatcccagccaggttcagtggcagtgggtctgggacagagttcactctcaccatcagcagcctgcagtctgaggattttgcagtttattactgtcagcagtattataactggcctccgtggacgttcggccaagggaccaaggtggaaatcaaac

SEQ ID NO: 895 - DNA, 385 bp, synthetic construct
  misc_feature 1..385: note = Synthetic
  source 1..385: mol_type = other DNA
gaggtgcagctggtggagtctgggggaggcctggtcaagcctggggggtccctgagactctcctgtgcagcctctggattcaccttcagtacctatagcatgaactgggtccgccaggctccagggaaggggctggagtgggtctcatccattagtagtagtagtagtttcatatactacgcagactcagtgaagggccgattcaccatctccagagacaacgccaagaactcactgtatctgcaaatgaacagcctgagagccgaggacacggctgtgtattactgtgcgagagagttgcccccagtattacgatattttgactggttatcctcatgggcttttgatatctggggccaagggacaatggtcaccgtctcttcag

SEQ ID NO: 896 - DNA, 331 bp, synthetic construct
  misc_feature 1..331: note = Synthetic
  source 1..331: mol_type = other DNA
cagtctgccctgactcagcctccctccgcgtccgggtctcctggacagtcagtcaccatctcctgcactggaaccagcagtgacgttggtggttataactatgtctcctggtaccaacagcacccaggcaaagcccccaaactcatgatttatgaggtcagtaagcggccctcaggggtccctgatcgcttctctggctccaagtctggcaacacggcctccctgaccgtctctgggctccaggctgaggatgaggctgattattactgcagctcatatgcaggcagcaacaattatgtcttcggaactgggaccaaggtcaccgtcctag

SEQ ID NO: 897 - DNA, 373 bp, synthetic construct
  misc_feature 1..373: note = Synthetic
  source 1..373: mol_type = other DNA
caggtgcagctggtggagtctgggggaggcgtagtccagcctgggaggtccctgagactctcctgtgcagcgtctggattcaccttcactaattatggcatgcactgggtccgccaggctccaggcaaggggctggagtgggtggcagttatatggtttgatggaagtaataaatactatggagactccgtgaagggccgattcaccatctccagagacaattccaagaacacactgtatctgcaaatgaacagcctgagggccgaggacacggctgtgtattactgtgcgagagatcggccgggtagcagcagctggtacgaattcggttttgactactggggccagggaaccctggtcaccgtctcctcag

SEQ ID NO: 898 - DNA, 325 bp, synthetic construct
  misc_feature 1..325: note = Synthetic
  source 1..325: mol_type = other DNA
tcctatgagctgactcagccaccctcggtgtctgtggccccaggacagacggccacgattagttgtgggggaaacaacattggaaggaaaagtgtgcactggcaccagcagaagccaggccaggcccctgtgctggtcgtctatgatgatagcgaccggccctcagggatccctgagcgattctctggctccaactctgggaacacggccaccctgaccatcagcagggtcgaagccggggatgaggccgactattactgtcaggtgtgggatagtagtagtgatcatgtggtattcggcggagggaccaagctgaccgtcctag

SEQ ID NO: 899 - DNA, 373 bp, synthetic construct
  misc_feature 1..373: note = Synthetic
  source 1..373: mol_type = other DNA
gaggtgcagctgttggagtctgggggaggcttggtacagcctggggggtccctgagactctcctgtgcagcctctggactcacctttagtagctatgccatgagctgggtccgccaggctccagggaaggggctggagtgggtctcagctattagtggtagtggtggtaacacatactacgcagactccgtgaagggccggttcaccatctccagagacaattccaagaacacgctgtatctgcaaatgaacagcctgagagccgaggacacggccgtatattactgtgcgcaaggggagcgtattgctatgatggtagtgcttacggtcattgaccactggggccagggaaccctggtcaccgtctcctcag

SEQ ID NO: 900 - DNA, 331 bp, synthetic construct
  misc_feature 1..331: note = Synthetic
  source 1..331: mol_type = other DNA
cagtctgtgctgactcagccgccctcagtgtctgcggccccaggacagaaggtcaccatctcctgctctggaagcagctccaacattgggaataattatgtatcgtggtaccagcagctcccaggaacagcccccaaactcctcatttatgacaataataagcgaccctcagggattcctgaccgattctctggctccaagtctggcacgtcagccaccctgggcatcaccggactccagactggggacgaggccgattattactgcggaacatgggatagcagcctgagtgcctatgtcttcggaactgggaccaaggtcaccgtcctag

SEQ ID NO: 901 - DNA, 379 bp, synthetic construct
  misc_feature 1..379: note = Synthetic
  source 1..379: mol_type = other DNA
gaggtgcagctggtggagtctgggggaggcctggtcaagcctggggggtccctgagactctcctgtgcagcctctggattcaccttctctgactataacatgaactgggtccgccaggctccagggaaggggctggagtgggtctcatccatttctggtcgtagtagtttcatatacttcgcagactcagtgaagggccgattcaccatctccagagacaacgccaagaactcactgtatctgcaaatgatcagcctgagagccgaggacacggctgtgtattactgtgcgagaacgtcctattccgatttttggagtggttattatcccgatgcttttgatatctggggccaagggacaatggtcaccgtctcttcag

SEQ ID NO: 902 - DNA, 325 bp, synthetic construct
  misc_feature 1..325: note = Synthetic
  source 1..325: mol_type = other DNA
gaaatagtgatgacgcagtctccagccaccctgtctgtgtctccaggggaaagagccaccctctcctgcagggccagtcagagtgttagcagcaacttagcctggtaccagcagaaacctggccaggctcccaggctcctcatctatggtgcatccaccagggccactggtatcccagccaggttcagtggcagtgggtctgggacagagttctctctcaccatcagcagcctgcagtctgaagattttgcagtttattactgtcagcagtattataactggcctccgtggacgttcggccaagggaccaaggtggaaatcaaac

SEQ ID NO: 903 - DNA, 379 bp, synthetic construct
  misc_feature 1..379: note = Synthetic
  source 1..379: mol_type = other DNA
caggtgcagctggtggagtctgggggaggcgtggtccagcctgggaggtccctgagactctcctgtgcagcctctggattcaccttcagtacctatgctatgcactgggtccgccaggctccaggcaaggggctggattgggtggcatttatttcatatgatggaagcgatgaatacttcgcagactccgtgaagggccgattcaccatctccagagacaattccaagaacacgctgtatctgcaaatgaacagcctgagagctgaggacacggctgtgtattactgtgcgagagattccggaatcgagggagctaaatgggtcgctgcctggtacttcgatctctggggccgtggcaccctggtcactgtctcctcag

SEQ ID NO: 904 - DNA, 322 bp, synthetic construct
  misc_feature 1..322: note = Synthetic
  source 1..322: mol_type = other DNA
gacatccagatgacccagtctccttccaccctgtctgcatctgtaggagacagagtcaccctcacttgccgggccagtcagagtattagtagctggttggcctggtatcagcagaaattagggaacgcccctaagctcctgatctataaggcgtctactttagaaagtggggtcccatcaaggttcagcggcagtggatctgggacagacttcactctcaccatcagcagcctgcagcctgatgattttgcaacttattactgccaacagtataatacttattcggggacgttcggccaagggaccaaggtggaaatcaaac

SEQ ID NO: 905 - DNA, 367 bp, synthetic construct
  misc_feature 1..367: note = Synthetic
  source 1..367: mol_type = other DNA
gaggtgcagctggtggagtctgggggaggcctggtcaagcctggggggtccctgagactctcctgtgcagcctctggattcaccttcagtacctataacgtgaactgggtccgccaggctccagggaaggggctggagtgggtctcatgcatcactagtagtggtggttacatatactacgcagactcagtgaagggccgattcaccatctccagagacaacgccaagaactcactgtatctgcaaatgaacagcctgagagccgaagacacggctgtgtattactgtgcgagagatgggtataactggaacgaccgcggttactttgactactggggccagggaaccctggtcaccgtctcctcag

SEQ ID NO: 906 - DNA, 322 bp, synthetic construct
  misc_feature 1..322: note = Synthetic
  source 1..322: mol_type = other DNA
gacatccagatgacccagtctccatcctccctgtctgcatctgtaggagacagagtcaccatcacttgccgggcaagtcagggcattagaaatgatttaggctggtatcagcagaaaccagggaaagcccctaagctcctgatctatggtacatccagtttacaaagtggggtcccatcaaggttcagcggcagtggatctggcacagatttcactctcaccatcagcagcctgcagcctgaagattttgcaacttattactgtctacaagattacaattaccctcgaacgttcggccaagggaccaaggtggaaatcaaac

SEQ ID NO: 907 - DNA, 379 bp, synthetic construct
  misc_feature 1..379: note = Synthetic
  source 1..379: mol_type = other DNA
caggtgcagctgcaggagtcgggcccaggactggtgaagccttcggagaccctgtccctcacctgcactgtctctggtggctccatcagtagttactactggagctggatccggcagcccccagggaagggactggagtggattgcatatatctattacagtggagacaccaactacagcaccaactacaacccctccctcaagagtcgagtcaccatttcagtagacacgtccaagaaccagatctccctgaagctgagctctgtgaccgctgcggacacggccgtgtattactgtgcgagggtggtagtaccagctgctatcatttttacctggttcgacccctggggccagggaaccctggtcaccgtctcctcag

SEQ ID NO: 908 - DNA, 322 bp, synthetic construct
  misc_feature 1..322: note = Synthetic
  source 1..322: mol_type = other DNA
gaaatagtgatgacgcagtctccagccaccctgtctgtgtctccaggggaaagagccaccctctcctgcagggccagtcagagtgttaggagcaacttagcctggtaccagcagaaacctggccaggctcccaggctcctcatctatggtgcatccaccagggccactggtatcccagccaggttcagtggcagtgggtctgggacagagttcactctcaccatcagcagcctgcagtctgaagattttgcagtttattactgtcagcagtataataactggcctcaaacgttcggccaagggaccaaggtggagatcaaac

SEQ ID NO: 909 - DNA, 361 bp, synthetic construct
  misc_feature 1..361: note = Synthetic
  source 1..361: mol_type = other DNA
caggtccagctggtacagtctggggctgaggtgaagaagcctggggcctcagtgaaggtctcctgcaaggtttccggatacaccctcactgaattatccatgcactgggtgcgacaggctcctggaaaagggcttgagtggatgggaggttttgatcctgaagatggtgaaacaatctacgcacagaagttccagggcagagtcaccatgaccgaggacacatctacagacacagcctacatggagctgagcagcctgagatctgaggacacggccgtgtattactgtgcaacttcaagtatagcagtggctggatggttcgacccctggggccagggaaccctggtcaccgtctcctcag

SEQ ID NO: 910 - DNA, 331 bp, synthetic construct
  misc_feature 1..331: note = Synthetic
  source 1..331: mol_type = other DNA
cagtctgccctgactcagcctgcctccgtgtctgggtctcctggacagtcgatcaccatctcctgcactggaaccagcagtgacgttggtggttataactatgtctcctggtaccaacagcacccaggcaaagcccccaaactcatgatttatgaggtcagtaatcggccctcaggggtttctaatcgcttctctggctccaagtctggcaacacggcctccctgaccatctctgggctccaggctgaggacgaggctgattattactgcagctcatatacaagcagcagcactagagtcttcggaactgggaccaaggtcaccgtcctag

SEQ ID NO: 911 - DNA, 376 bp, synthetic construct
  misc_feature 1..376: note = Synthetic
  source 1..376: mol_type = other DNA
caggtgcagctggtggagtctgggggaggcttggtcaagccaggagggtccctgagactctcctgtgcagcctctggattcaccttcagtgactactacatgagctggatccgccaggctccagggaaggggctggagtgggtttcatacattagtagtagtggtagtatcatatactacgcagactctgtgaagggccgattcaccatctccagggacaacgccaagaactcactgtatctgcaaatgaacagcctgagagccgaggacacggccgtgtattactgtgcgagagaacccactactatggttcggggaattacggttgggtacttcgatctctggggccgtggcaccctggtcaccgtctcctcag

SEQ ID NO: 912 - DNA, 322 bp, synthetic construct
  misc_feature 1..322: note = Synthetic
  source 1..322: mol_type = other DNA
gaaatagtgatgacgcagtctccagccaccctgtctgtgtctccaggggaaagagccaccctctcctgcagggccagtcagagtgttagcagcaacttagcctggtaccagcagaaacctggccaggctcccaggctcctcatctatggtgcatccaccagggccactggtatcccagccaggttcagtggcagtgagtctgggacagagttcactctcaccatcagcagcctgcagtctgaagattttgcagtttattactgtcagcagtataataactggcctcggacgttcggccaagggaccaaggtggaaatcaaac

SEQ ID NO: 913 - DNA, 382 bp, synthetic construct
  misc_feature 1..382: note = Synthetic
  source 1..382: mol_type = other DNA
caggtccagctggtacagtctggggctgaggtgaagaagcctggggcctcagtgaaggtctcctgcaaggtttccggatacaccctcactgaattatccatacactgggtgcgacaggctcctggaaaagggcttgagtggatgggaagttttgatcctgaagatggtgaaacaatctgcgcacagaagttccagggcagagtcaccatgaccgaggacacatctacagacacagcctacatggagctgagcagcctgagatctgaggacacggccgtgtattactgtgcaacagagtggaggggttgtagtgataccagctgccaggggaccaactggttcgacccctggggccagggaaccctggtcaccgtctcctcag

SEQ ID NO: 914 - DNA, 333 bp, synthetic construct
  misc_feature 1..333: note = Synthetic
  source 1..333: mol_type = other DNA
cagcctgtgctgactcaatcgccctctgcctctgcctccctgggagcctcggtcaagctcacctgcactctgagcagtgggcacagcacctacgccatcgcatggcatcagcagcagccagagaagggccctcggtacttgatgaagcttaacagtgatggcagccacaacaagggggacgggatccctgatcgcttctcaggctccagctctggggctgagcgctacctcaccatctccagcctccagtctgaggatgaggctgactattactgtcagacctggggcactggcgttcgggtgttcggcggagggaccaagctgaccgtccta

SEQ ID NO: 915 - DNA, 370 bp, synthetic construct
  misc_feature 1..370: note = Synthetic
  source 1..370: mol_type = other DNA
cagctgcagctgcaggagtcgggcccaggactggtgaagccttcggagaccctgtccctcacctgcactgtctctggtggctccatcagcggtagtagttacttctggggctggatccgccagcccccagggaaggggctggagtggattgggactatctattatagtgggagcacctactacaacccgtccctcaagagtcgagtcaccatatccgtagacacgtccaagaatcagttctccctgaagctgagctctgtgaccgccgcagacacggctgtgtattactgtgcgagatatgtacgtggatacagcttagatgatgcttttgatatctggggccaagggacaatggtcaccgtctcttcag

SEQ ID NO: 916 - DNA, 322 bp, synthetic construct
  misc_feature 1..322: note = Synthetic
  source 1..322: mol_type = other DNA
gacatccagatgacccagtctccatcctccctgtctgcatctgtaggagacagagtcaccatcacttgccgggcaagtcagggcattagaaatgatttaggctggtatcagcagaaaccagggaaagcccctaagcgcctgatctatgctgcatccagtttgcaaagtggggtcccatcaaggttcagcggcagtggatctgggacagaattcactctcacaatcagcagcctgcagcctgaagattttgcaacttattactgtctacagtataatagctaccctctcactttcggcggagggaccaaggtggagatcaaac

SEQ ID NO: 917 - DNA, 367 bp, synthetic construct
  misc_feature 1..367: note = Synthetic
  source 1..367: mol_type = other DNA
caggtgcagctgcaggagtcgggcccaggactggtgaagccttcggagaccctgtccctcacctgcactgtctctggtggctccatcagtagttactactggagctggatccggcagcccccagggaagggactggagtggattgggtatatctattacagtgggaccagcaactacaatccctccatcaagagtcgagtcaccatatcagtagacacgtccaagaaccagttctccctgaagctgagctctgtgaccgctgcggacacggccgtgtattactgtgcgagaagtacgatttttggagtgaccataccggggtgctttgactactggggccagggaaccctggtcaccgtctcctcag

SEQ ID NO: 918 - DNA, 319 bp, synthetic construct
  misc_feature 1..319: note = Synthetic
  source 1..319: mol_type = other DNA
tcctatgagctgactcagccaccctcggtgtcagtggccccaggacagacggccaggattacctgtgggggaaacaacattggaagtaaaagtgtgcactggtaccagcagaagccaggccaggcccctgtgctggtcgtctatgatgatagcgaccggccctcagggatccctgagcgattctctggctccaactctgggaacacggccaccctgaccatcagcagggtcgaagccggggatgaggccgactattactgtcaggtgtgggatagtagtagtgtggtattcggcggagggaccaagctgaccgtcctag

SEQ ID NO: 919 - DNA, 361 bp, synthetic construct
  misc_feature 1..361: note = Synthetic
  source 1..361: mol_type = other DNA
caggtgcagctacagcagtggggcgcaggactgttgaagccttcggagaccctgtccctcacctgcgctgtctatggtgggtccttcagtggttactactggagctggatccgccagcccccagggaaggggctggagtggattggggaaatcaatcatagtggaagcaccaactacaacccgtccctcaagagtcgagtcaccatatcagtagacacgtccaagaaccagttctccctgaagctgagctctgtgaccgccgcggacacggctgtgtattactgtgcgagatggtggggtagtggttattactacgttggggactactggggccagggaaccctggtcaccgtctcctcag

SEQ ID NO: 920 - DNA, 331 bp, synthetic construct
  misc_feature 1..331: note = Synthetic
  source 1..331: mol_type = other DNA
cagtctgccctgactcagcctgcctccgtgtctgggtctcctggacagtcgatcaccatctcctgcactggaaccagcagtgatgttgggagttataaccttgtctcctggtaccaacagcacccaggcaaagcccccaaactcatgatttatgagggcagtaagcggccctcaggggtttctaatcgcttctctggctccaagtctggcaacacggcctccctgacaatctctgggctccaggctgaggacgaggctgattattactgctgctcatatgcaggtagtagcacttgggtgttcggcggagggaccaagctgaccgtcctag

SEQ ID NO: 921 - DNA, 370 bp, synthetic construct
  misc_feature 1..370: note = Synthetic
  source 1..370: mol_type = other DNA
caggtgcagctggtggagtctgggggaggcgtggtccagcctgggaggtccctgagactctcctgtgcagcctctggattcaccttcagtagctattctatgcactgggtccgccaggctccaggcaaggggctggagtgggtggcacttatatcatatgatggaagcaataaatactacgcagactccgtgaagggccgattcaccatctccagagacaattccaagaacacgctgtatctgcaaatgaacagcctgagagctgaggacacggctgtgtatttctgtgcgagtccccgcgggagtagtgcttattaccaacacgcccttgactactggggccagggaaccctggtcaccgtctcctcag

SEQ ID NO: 922 - DNA, 322 bp, synthetic construct
  misc_feature 1..322: note = Synthetic
  source 1..322: mol_type = other DNA
gacatccagatgacccagtctccatcctccctgtctgcatctgtaggagacagagtcaccatcacttgccaggcgagtcaggacattagcaactatttaaattggtatcagcagaaaccagggaaagcccctaagctcctgatctacgatgcattcaatttggaaacaggggtcccatcaaggttcagtggaagtggatctgggacagattttactttcaccatcagcagcctgcagcctgaagatgttgcaacatattactgtcaacattatgataatctcccgaacacttttggccaggggaccaagctggagatcaaac

SEQ ID NO: 923 - DNA, 400 bp, synthetic construct
  misc_feature 1..400: note = Synthetic
  source 1..400: mol_type = other DNA
gaggtgcagctggtggagtctgggggaggcctggtcaagcctggggggtccctgagactctcctgtgcagcctctggattcaccttcagtagctatagcatgaactgggtccgccaggctccagggaaggggctggagtgggtctcatccattagtagtagtagtagttacatatactacgtagactcagtgaagggccgattcaccatctccagagacaacgccaagaactcactgtctctgcaaatgaacagcctgagagccgaggacacggctgtgtattactgtgcgagaggtggctatggttcggggagttattataacgtcggattttccgactattttaacgtcggattttccgactactggggccagggaaccctggtcaccgtctcctcag

SEQ ID NO: 924 - DNA, 325 bp, synthetic construct
  misc_feature 1..325: note = Synthetic
  source 1..325: mol_type = other DNA
gaaatagtgatgacgcagtctccagccaccctgtctgtgtctccaggggaaagagccaccctctcctgcagggccagtcagagtattagcagcaacttagcctggtaccagcagaaacctggccaggctcccaggctcctcatctatggtgcatccaccagggccactggtatcccagccaggttcagtggcagtgggtctgggacagagttcactctcaccatcagcagcctgcagtctgaagattttgcagtttattactgtcagcagtattataactggcctccgtggacgttcggccaagggaccaaggtggaaatcaaac

SEQ ID NO: 925 - DNA, 394 bp, synthetic construct
  misc_feature 1..394: note = Synthetic
  source 1..394: mol_type = other DNA
caggtgcagctggtggagtctgggggaggcgtggtccagcctgggaggtccctgagactctcctgtgcagcctctggattcaccttcagtagctatgctatgcactgggtccgccaggctccaggcaaggggctggagtgggtggcagttatatcatatgatggaagcaataaatactacgcagactccgtgaagggccgattcaccatctccagagacaattccaagaacacgctgtatctgcaaatgaacagcctgagagctgaggacacggctgtgtattactgtgcgagagatcaacaaactttaaatccgtatagcagcaggtggtattcagtgggggagtggtacttcgatctctggggccgtggcaccctggtcaccgtctcctcag

SEQ ID NO: 926 - DNA, 334 bp, synthetic construct
  misc_feature 1..334: note = Synthetic
  source 1..334: mol_type = other DNA
cagcctgtgctgactcaatcgccctctgcctctgcctccctgggagcctcggtcaagctcacctgcactctgagcagtgggcacagcagctacgccatcgcatggcatcaacagcagccagagaagggccctcgatacttgatgaagcttaacagtgatggcacccacaacaagggggacgggatccctgatcgcttctcaggctccagctctggggctgagcgctacctcaccatctccagcctccagtctgaggatgaggctgactattactgtcagacctggggcactggcattgtgctattcggcggagggaccaagttgaccgtcctag

SEQ ID NO: 927 - DNA, 370 bp, synthetic construct
  misc_feature 1..370: note = Synthetic
  source 1..370: mol_type = other DNA
cagctgcagctgcaggagtcgggcccaggactggtgaggccttcggagaccctgtccctcacctgcactgtctctggtggctccatcgccagtagtagttactactgggtctggatccgccagaccccagggaaggggctggagtggattgggagtatcttttatagtggcaccacctactacaacccgtccctcaagagtcgagtcaccatgtccgtagacacgtccacgaaccagttctccctgaagttgacctctgtgaccgccgctgacacggctatatattactgtgcttcgtatttttatggatacagttatgatgaggcttttgataactggggccaagggacaatggtcaccgtctcttcag

SEQ ID NO: 928 - DNA, 320 bp, synthetic construct
  misc_feature 1..320: note = Synthetic
  source 1..320: mol_type = other DNA
gacatccagatgacccagtctccatcctccctgtctgcatctgttggagacagagtcaccgtcacttgccgggcaagtcaggacgttagaaatgatttaggctggtatcagcagaaaccagggaaagcccctaagcgcctgatctatgctgcatccagtttgcaaagtggagtcccatcaagattcagcggcagtggatctgggacagaattcactctcacaatcagcagcctgcagcctgaagattttgcaacttattactgtctacagtataatagttaccctctcactttcggcggagggaccaaggtggaaatcaa

SEQ ID NO: 929 - DNA, 364 bp, synthetic construct
  misc_feature 1..364: note = Synthetic
  source 1..364: mol_type = other DNA
caggtgcagctggtggagtcggggggaggcgtggtccagccagggaggtccctgagactctcctgtgcagcgtctggattcaccttcacttcctatggcattcactgggtccgccaggctccaggcaaggggctggagtgggtggcacttatgttctttgatggaagtaatagacactatgcagactccgtgaagggccgattcaccatctccagagacatttccaagaacacgctgtttttggaaatgaacagtctgagagccgaggacacggctgtgtatttctgtgcgagagatggtggatttactggctacgcccaccttgcctactggggccagggaaccctggtcaccgtctcctcag

SEQ ID NO: 930 - DNA, 328 bp, synthetic construct
  misc_feature 1..328: note = Synthetic
  source 1..328: mol_type = other DNA
gaaattgtgttgacgcagtctccaggcaccctgtctttgtctcccggggaaagagccaccctctcctgcagggccagtcagagtgttagcagcagctacttagcctggtaccagcagaaacctggccaggctcccaggctcctcatctatggtgcatccagcagggccactggcatcccagacaggttcagtggcagtgggtctgggacagacttcactctcaccatcagcagactggagcctgaagattttgcagtgtattactgtcagcagtatggtagttcacctacgtggacgttcggccaagggaccaaggtggaaatcaaac

SEQ ID NO: 931 - DNA, 367 bp, synthetic construct
  misc_feature 1..367: note = Synthetic
  source 1..367: mol_type = other DNA
caggttcagctggtgcagtctggagctgaggtgaagaagcctggggcctcagtgaaggtctcctgcaaggcttctggttacacctttaacacctacggtatcagctgggtgcgacaggcccctggacaagggcttgagtggatgggatggatcagcgcttacaagggtgacacaaactatgcacagaagctccagggcagagtcaccatgaccacagacacatccacgagcacagcctacatggagctgaggagcctgagatctgacgacacggccgtgtattactgtgcgagagattttggatatagctatggtcgtgatggttttgatatctggggccaagggacaatggtcaccgtctcttcag

SEQ ID NO: 932 - DNA, 334 bp, synthetic construct
  misc_feature 1..334: note = Synthetic
  source 1..334: mol_type = other DNA
cagtctgtgctgacgcagccgccctcagtgtctggggccccagggcagagggtcaccatctcctgcactgggagcagctccaacatcggggcaggttatgatgtacactggtaccagcagtttccaggaacagcccccaaatttctcatctctggtaacagctatcggccctcaggggtccctgaccgattctctggctccaagtctggcacctcagcctccctggccatcactgggctccaggctgaggatgaggctgattattactgccagtcgtatgacaggagcctgagtggctgggtgttcggcggagggaccaagctgaccgtcctag

SEQ ID NO: 933 - DNA, 399 bp, synthetic construct
  misc_feature 1..399: note = Synthetic
  source 1..399: mol_type = other DNA
gaagtgcagctggtggagtctgggggaggcttggtacagcctggcaggtccctgagactctcctgtgcagcctctggattcacctttgatgattacgccatgcactgggtccggcaagctccagggaagggcctggagtgggtctcaggtattagttggaccagtgacatcatcggctatgcggactctgtgaagggccgattcaccatctccagagacaacgccaaggactccctgcatctgcaaatgaacagtctgagacttgaggacacggccatctattactgtgcaaaagatgttaacacccgggaagctgtggctggtttcctttctgctttggacaactactattacggtatggacgtctggggccaagggaccacggtcaccgtctcctca

SEQ ID NO: 934 - DNA, 337 bp, synthetic construct
  misc_feature 1..337: note = Synthetic
  source 1..337: mol_type = other DNA
gatattgtgatgactcagtctccactctccctgcccgtcacccctggagagccggcctccatctcctgcaggtctagtcagagcctcctgcatagaaatggatacaagtatttggattggtacctgcagaagccagggcagtctccacagctcctgatctatttgggttctaatcgggcctccggggtccctgacaggttcagtggcagtggatcaggcacagattttacactgaaaatcaacagagtggaggctgaggatgttgggatttattactgcatgcaagctctacaaactccctggacgttcggccaagggaccaaggtggaaatcaaac

SEQ ID NO: 935 - DNA, 385 bp, synthetic construct
  misc_feature 1..385: note = Synthetic
  source 1..385: mol_type = other DNA
gaggtgcagctggtggagtcggggggaggcctggtcaagcctggggggtccctgagactctcctgtgcagcctctggattcagcttcactaattataccatgaactgggtccgccaggctccagggaaggagctggagtgggtctcatccattagtggtagtagacttttcatatactatgcagactcagtgaagggccgattcaccatctccagagacaacgccaagaactcactgtttctgcaaatgaacagcctgagagtcgaggacacggctgtgtattactgtgcgagagagttgcccccattattacgatattttgactggttatcctcatgggcttttgatatctggggccaagggacaatggtcaccgtctcttcag

SEQ ID NO: 936 - DNA, 331 bp, synthetic construct
  misc_feature 1..331: note = Synthetic
  source 1..331: mol_type = other DNA
cagtctgccctgactcagcctccctccgcgtccgggtctcctggacagtcagtcaccatctcctgcactggaaccagcagtgacgttggtggttataattatgtctcctggtaccaacagcacccaggcaaagcccccaaactcatgatttatgaggtcactaagcggccctcaggggtccctgatcgcttctctggctccaagtctggcaacacggcctccctgaccgtctctgggctgcaggctgaggatgagtctgattattactgcagttcatatgcaggcaccaacaattatgtcttcggaactgggaccaaagtcaccgtcctag

SEQ ID NO: 937 - DNA, 373 bp, synthetic construct
  misc_feature 1..373: note = Synthetic
  source 1..373: mol_type = other DNA
caggtgcagctggtggagtctgggggaggcgtagtccagcctgggaggtccctgagactctcctgtgcagcgtctggattcaccttcagtaattatggcatgcactgggtccgccaggctccaggcaaggggctggagtgggtggcagttacatggtttgatggaagtaataaatactacggagactccgtgaagggccgattcaccatctccagagacaattccaagaacacactgtatctgcaaatgaacagcctgagggccgaggacacggctgtgtattactgtgcgagagatcggccgggtagcagcagctggtacgaattcggttttgactactggggccagggaaccctggtcaccgtctcctcag

SEQ ID NO: 938 - DNA, 325 bp, synthetic construct
  misc_feature 1..325: note = Synthetic
  source 1..325: mol_type = other DNA
tcctatgagctgactcagccaccctcggtgtctgtggccccaggacagacggccacgattagttgtgggggaaacaacattggaaggaaaagtgtgcactggcaccagcagaagccaggccaggcccctgtgctggtcgtctatgatgatagcgaccggccctcagggatccctgagcgattctctggctccaactctgggaacacggccaccctgaccatcagcagggtcgaggccggggatgaggccgactattattgtcaagtgtgggatagtagtagtgatcatgtggtattcggcggagggaccaagctgaccgtcctag

SEQ ID NO: 939 - DNA, 364 bp, synthetic construct
  misc_feature 1..364: note = Synthetic
  source 1..364: mol_type = other DNA
caggtgcagctggtgcagtctggggctgaggtgaagaagcctgggtcctcggtgaaggtctcctgcaagacttctggaggcaccttcaatagttttgctatcaactgggtgcgacaggcccctggacaagggcctgagtggatgggaagggtcatccctgtacttgaaatagcaaactacgcacagaagttccagggcagaatcacaattaccgcggacaaatccacgagcacagcttacatggaactgagcagcctgacatctgaggacacggccatatattactgtgcgagacaccatatagcagtggcccagccttactttgactactggggccagggaaccctggtcaccgtctcctcag

SEQ ID NO: 940 - DNA, 330 bp, synthetic construct
  misc_feature 1..330: note = Synthetic
  source 1..330: mol_type = other DNA
cagtctgtgctgactcagccaccctcagcgtctgggacccccgggcagagggtcaccatctcttgttctggaagcagctccaacatcggaagtaatactgtaaactggtaccagcatctcccaggaacggcccccaaactcctcatgtctagtgatgatcagcggccctcaggggtccctgcccgattctctggctccaagtctggcacctccgcctccctggccatcagtgggctccggtctgaggatgaggctgattattactgtgcgtcgtgggatgacagactgaatggagtggttttcggcggagggaccaagctgaccgtccta

SEQ ID NO: 941 - DNA, 373 bp, synthetic construct
  misc_feature 1..373: note = Synthetic
  source 1..373: mol_type = other DNA
gaggtgcagctgttggagtctgggggaggcttggtacagccgggggggtccctgagactcgcctgtgcagcctctggattcacctttaacaactatgccatgagttgggtccgccaggctccagggaaggggctggagtgggtctcaggtattagcggtggtggcggtgacacatactacgccgactccgtgaggggccggttctccatctccagagacaattccaagaacaggctgcttctgcaaatgaacagcctgagagccgaggacacggccgtatattactgtgtgaaaggagaacgtatcattatgttagcagtggttacgttccttgactactggggccagggaaccctggtcaccgtctcctcag

SEQ ID NO: 942 - DNA, 331 bp, synthetic construct
  misc_feature 1..331: note = Synthetic
  source 1..331: mol_type = other DNA
cagtctgtgctgacgcagccgccctcagtgtctgcggccccaggacagaaggtcaccgtctcctgctctggaagcagctccaacattgggaagaattatgtgtcctggttccagcagctcccaggaacagcccccaaactcctcatttatgacaataataagcgaccctcaggaaatcctgaccgattctctggctccaagtctggcacgtcagccaccctgggcatcaccggactccagactggtgacgaggccgattattattgcggaacatgggatagcagcctgagtgtttatgtcttcggaactgggaccaaggtcaccgtcctag

SEQ ID NO: 943 - DNA, 378 bp, synthetic construct
  misc_feature 1..378: note = Synthetic
  source 1..378: mol_type = other DNA
caggtccagctggtacagtctggggctgaaatgaagaagcctggggcctcagtgagggtctcctgcaaggtttccggatacaatctcgttgaagtttccatacactgggtccgtcaggctcctggaaaagggcttgagtggatgggaggttttgatgctgaagatgctaaaacaatctatgcacagaagttccaggacagaatcaccatgaccgaggacacatctacagacacagcctacatggagctgagcagcctgagatttgaggacacggccgtgtattactgtgcaacagcccctgccttcctggaacgacgggaatactcctattacggtatgaatgtctggggccaagggaccacggtcaccgtctcctca

SEQ ID NO: 944 - DNA, 322 bp, synthetic construct
  misc_feature 1..322: note = Synthetic
  source 1..322: mol_type = other DNA
gacatccagttgacccagtctccatccctcctgtctgcatctgtcggggacagagtcaccatcacttgccgggccagtcagggcattaacaattatttagcctggtatcagcaaaaaccagggaaagcccctaagctcttgatctatggtgcatccactttgcaaagtggggtcccatctaaattcagcggcagtggatctgggacagagttcactctcacaatcagcagcctgcagcctgaagattttgcaacttattactgtcaacaagttagtagtttccctcgtactttcggccctgggaccaaagtggatatcaaac

SEQ ID NO: 945 - DNA, 379 bp, synthetic construct
  misc_feature 1..379: note = Synthetic
  source 1..379: mol_type = other DNA
caggtgcagctggtggagtctgggggaggcgtggtccagcctgggaggtccctgagactctcctgtgcagcctctggattcaccttcacgaattttggcatgcactgggtccgccaggctccaggcaaggggctgcagtgggtggcagttatttcatatgatggaattaataaacactttgcagactccgtgaagggccgattcaccatctccagagacaattccaagaacacggtgtatctgcaaatgaacagcctgagacctgaggacacggctgtgtattactgtgcgaaagtcagcggggctaggcactacggtgactacggggaaacctcctttgactactggggccagggaaccctggtcaccgtctcctcag

SEQ ID NO: 946 - DNA, 328 bp, synthetic construct
  misc_feature 1..328: note = Synthetic
  source 1..328: mol_type = other DNA
gaaattgtgttgacgcagtctccaggcaccctgtctttgtctccaggggaaagcgccaccctctcctgcagggccagtcagagtattagtaatagctacgtagcctggtatcagcagaggcctggccagcctcccaggctcctcatctatggtgtatccagcagggccactgacatcccagacaggttcagtggcagtgggtctgggacagacttcactctcaccatcagcagactggagcctgaagattttgcagtgtattactgtcagcagtatgggagctcacccccgtacacttttggccaggggaccaagctggagatcaaac

SEQ ID NO: 947 - DNA, 379 bp, synthetic construct
  misc_feature 1..379: note = Synthetic
  source 1..379: mol_type = other DNA
caggtgcagctggtggagtctgggggaggcgtggtccagcctgggaggtccctgagactctcctgtgcagcctctggattcaccttcagtagctatggcatgcactgggtccgccaggctccaggcaaggggctggagtgggtggcagttatatcatatgatggaagtaataaaaactatgcagactccgtgaagggccgattcaccatctccagagacaattccaagaacacgctgtatctgcaaatgaacagcctgagagctgaggacacggctgtgtattactgtgcgacagattactatgatcgtagtcattattacggccttaccagcccttttgactactggggccagggaaccctggtcaccgtctcctcag

SEQ ID NO: 948 - DNA, 340 bp, synthetic construct
  misc_feature 1..340: note = Synthetic
  source 1..340: mol_type = other DNA
gatattgtgatgacccagactccactctccctgcccgtcacccctggagagccggcctccatctcctgcaggtctagtcagagcctcttggatagtgatgatggaaacacctatttggactggttcctgcagaagccagggcagtctccacagctcctgatccatacgctttcctatcgggcctctggagtcccagacaggttcagtggcagtgggtcaggcactgatttcacactgaaaatcagcagggtggaggctgaggatgttggagtttattactgcatgcaacgtatagagtttccgatcaccttcggccaagggacacgactggagattaaac

SEQ ID NO: 949 - DNA, 367 bp, synthetic construct
  misc_feature 1..367: note = Synthetic
  source 1..367: mol_type = other DNA
caggtgcagctggtggagtcggggggaggcgtggtcaagcctgggaggtccctgagactctcctgtgcagcctctggactcaccttcagtagttatggcatgcactgggtccgccaggctccaggcaaggggctggagtgggtggcagttttatcatctgatggaaggaccgagcactatgcagactccgtgaagggccgattcaccatctccagagacaattccaacaacaccctgtatctgcaaatggacagcctgagacctgaggacacggctgtgtattactgtgcgaatagtgatcctactggttattactggggcctttttgactactggggccagggaaccctggtcaccgtctcctcag

SEQ ID NO: 950 - DNA, 322 bp, synthetic construct
  misc_feature 1..322: note = Synthetic
  source 1..322: mol_type = other DNA
gacatccagatgacccagtctccatcctctctgtctgcatctgtaggagacagagtcaccatcacttgccgggcaagtcggggcattagacatgacttagactggtatcagcagaaaccagggaaagcccctgaacacctgatctacgctgcatcccgtttgcaaagtggggtcccatcaaggttcagcggcagtgggtctgggacagaattcactctcacaatcagcagcctgcagcctgatgattttgcaacttattactgtctacagcataacagttttcccctcactttcggcggagggaccaaggtggaaatcaaac

SEQ ID NO: 951 - DNA, 373 bp, synthetic construct
  misc_feature 1..373: note = Synthetic
  source 1..373: mol_type = other DNA
caggtgcagctgcaggagtcgggcccaggactggtgaagccttcacagaccctgtccctcacctgcattgtctctggtgcctccatcagcagtggtgattactactggaattggatccgccagcccccagggaagggcctggagtggattgggtacatctactacagtgggagcacccactacaacccgtccctcagcagtcgagtaaccatttcgatagacacgtccaagaaccagttctccctgaagttgaactctgtgactgccgcagacacggccgtctactactgtgccagatcgaaactttcgaggacttattataacttcccatttgactcctggggccagggaaccctggtcaccgtctcctcag

SEQ ID NO: 952 - DNA, 340 bp, synthetic construct
  misc_feature 1..340: note = Synthetic
  source 1..340: mol_type = other DNA
gacatcgtgatgacccagtctccagactccctggctgtgtctctgggcgggagggccaccatcaactgcaagtccagccagagtgttttatacagctccaacaataagaattacttagcgtggtaccagcagaaaccaggacagcctcctaagctgctcatttattgggcatctacccgggaatccggggtccctgaccgattcagtggcagcgggtctgggacagatttcactctcaccatcagcagcctgcaggctgcagatgtggcagtttattactgtcagcaatattataatattcctcggacgttcggccaagggaccaaggtggagatcaaac

SEQ ID NO: 953 - DNA, 366 bp, synthetic construct
  misc_feature 1..366: note = Synthetic
  source 1..366: mol_type = other DNA
gaggtgcagctggtggagtctgggggaggcctggtcaagccgggggggtccctgagactctcctgtgcagcctctggattcaccttcagtagctataccatgaactgggtccgccaggctccagggaaggggctggagtgggtctcatccattagcagtaggagtaatttcatatactacgtagactcagtgaggggccgattcaccatctccagagacaacgccaggaactcactgtatctgcaaatgaacagcctgagagccgaggacacggctgtgtattactgtgcgagagagtatagcagcagctggtataacggacctctggacgtctggggccaagggaccacggtcaccgtctcctca

SEQ ID NO: 954 - DNA, 331 bp, synthetic construct
  misc_feature 1..331: note = Synthetic
  source 1..331: mol_type = other DNA
gaaattgtgttgacgcagtctccaggcaccctgtctttgtctccaggggaaagagccaccctctcctgcagggccagtcagagtgttagcggcgactacttagcctggtaccaacagaagcctggccagactcccaggctcctcatctatggtgcatccagcagggccactggcatcccagacaggttcagtggcagtgggtctgggacagacttcactctcaccatcagcagactggaggctgaagattttgcagtatattactgtcagcagtatggtagctcacctcccctctggacgttcggccacgggaccaaggtggaaatcaaac

SEQ ID NO: 955 - DNA, 379 bp, synthetic construct
  misc_feature 1..379: note = Synthetic
  source 1..379: mol_type = other DNA
gaagtgcagctggtggagtctgggggagggttggtacagcctggcgggtccctgcgactctcctgtgtagcctctggattcacctttgatgattatgccatgcactgggtccggcaagttccagggaagggcctggagtgggtctcaggtattagttggaaaggtgatagcagaggctatggggactctgtgaagggccgaatcaccatttccagagacaacgccaagaagtccctatatctgcaaatgaccagtctgagaagtgaggacacggccttgtattactgtgcaaagggcggcggagatcgcagacagactagattttttttagatgtttttgatatgtggggcccagggacaatggtcaccgtctcttcag

SEQ ID NO: 956 - DNA, 340 bp, synthetic construct
  misc_feature 1..340: note = Synthetic
  source 1..340: mol_type = other DNA
gacatcgtgatgacccagtctccagactccctggctgtgtctctgggcgagagggctaccatcaactgcaagaccagccagcgtgttttatacagctccgacaataagaactacttagcttggtatcagcagaaaccaggacagcctcctaagctgctcatttactgggcatctacccgggaatccggggtccctgaccgattcagtggcagcgggtctgggacagatttcactctcaccatcaacagcctgcaggctgaagatgtggcagtttattactgtcagcaatattatcttactcctctcactttcggcggagggaccaaggtggaaatcaaac

SEQ ID NO: 957 - DNA, 364 bp, synthetic construct
  misc_feature 1..364: note = Synthetic
  source 1..364: mol_type = other DNA
caggtgcagctgcaggagtcgggcccaggactggtgaagccttcggagaccctgtccctcacctgcactgtctctggtggctccatgaggggttactactggagttggatccggcagtccccagggaagggactggaatggattggctatgtctattacactgggaccaccaactacaattcctccctcaggagtcgagtctccatctcagtagacacgtccaagaaccagttctccctgaaggtggggtctgtgaccgctgcggacacggccatttattactgtgcgagtgtcgtagattctactgcggacccctactactttcacttctggggccagggaaccctggtcaccgtctcctcag

SEQ ID NO: 958 - DNA, 322 bp, synthetic construct
  misc_feature 1..322: note = Synthetic
  source 1..322: mol_type = other DNA
tcctatgagctgacacagccactctcagtgtcggtggccctgggacagacggccaggattacctgtgggggacacaagattggaaataaatatgtccactggtaccagcagaagccaggccaggcccctgtactggtcatctatagggataccagtcggccctctgggatccctgagcgattctctggctccaagtcggagaacacggccaccctgactatcagtggggcccaagtcggggatgaggctgactattattgtcaggtgtgggacagcagcgctcctgtggttttcggcggagggaccgacctgaccgtcctag

SEQ ID NO: 959 - DNA, 362 bp, synthetic construct
  misc_feature 1..362: note = Synthetic
  source 1..362: mol_type = other DNA
caggtgcagctgcaggagtcgggcccaggactggtgaagccttcggagaccctgtccctcacctgcactgtctctggtgcctccatcagtacttactactggagctggatccggcagcccccagggaaggggctggagtggattggatatatctattacagtgtgagtttcaactacaacccctccctcaagggtcgagtcaccatatcagcagacacgtccaagaaccagttctccctgaagctgacctctgtgaccgctgcggacacggccgtgtattactgtgcgagagattatggtgatggtaatttccggtcctactttgactactggggccagggaatcctggtcaccgtctcctc

SEQ ID NO: 960 - DNA, 322 bp, synthetic construct
  misc_feature 1..322: note = Synthetic
  source 1..322: mol_type = other DNA
gaaatagtgatgacgcagtctccagccaccctgtctgtgtctccaggggaaagagccaccctctcctgcagggccagtcagagtgttagcagcaacttagcctggtaccagcagaaacctggccaggctcccaggctcctcatctatggtgcatccaccagggccactggtatcccagccaggttcagtggcagtgggtctgggacagagttcactctcaccatcagcagcctgcagtctgaagattttgcagtttattactgtcagcagtataatagctggcctcgggcgttcggcctggggaccaaggtggaaatcaaac

SEQ ID NO: 961 - DNA, 367 bp, synthetic construct
  misc_feature 1..367: note = Synthetic
  source 1..367: mol_type = other DNA
gaggtgcagctgttggagtctgggggaggcttggtacagcctggggggtccctgagactctcctgtgcagcctctggattcacgtttagcagctatgccatgagctgggtccgccaggctccagggaaggggctggagtgggtctcacttattagtggtaatggtggtagtacatattacgcagactccgtgaagggccggttcatcgcctccagagacagttccaagaacacgctgtatctgcaaatgaacagcctgagagtcgaggacacggccgtatattactgtgcgaaaggggatacatttatggtcccttacaactggttcgacccctggggccagggaaccctggtcaccgtctcctcag

SEQ ID NO: 962 - DNA, 317 bp, synthetic construct
  misc_feature 1..317: note = Synthetic
  source 1..317: mol_type = other DNA
gaaattgtgttgacacagtctccagccaccctatctttgtctccaggggaaagagccaccctctcctgcagggccagtcagagtattagcacctacttagcctggtaccaacagaaacctggccaggctcccaggctcctcatctatgatgtttccaacagggccactggcatcccagccaggttcagtggcagtgggtctgggacagacttcactctcaccatcagcggcctggagactgaagattttgcagtttattactgtcagcagcgtggcgacttgccctctttcggcggagggaccaaggtggagatcaa

SEQ ID NO: 963 - DNA, 367 bp, synthetic construct
  misc_feature 1..367: note = Synthetic
  source 1..367: mol_type = other DNA
gaggtgcagctgttggagtctgggggaggcttggtccagccgggggggtccctgagactctcctgtgctgcctctggattcacctttagcagctatgccatgaactgggtccgccaggctccaggaaaggggctggagtgggtctcagctatccgaagtactggtgttagcacatattacgcagactccgtgaggggccggttcaccatctccagagacaattccaagaacacgctgtatcttcaaatgaacagcctgagagccgaagacacggccgtatattactgtgcgaaaggggatacagcaatggcaaagtacaactggttcgacccctggggccagggaaccctggtcaccgtctcctcag

SEQ ID NO: 964 - DNA, 380 bp, synthetic construct
  misc_feature 1..380: note = Synthetic
  source 1..380: mol_type = other DNA
caggtgcagctgcaggagtcgggcccaggactggtgaagccttcggagaccctgtccctcacctgcagtgtctctggcggctccgtcagcaatggtacttcctactggagctggatccggcagcccccagggaagcgattggagtggattgggtacatctattaccgtgggagcaccaattacatcaccaattacagctcctccctcaagggacgcgtcaccatttcagtagacacgtccaggaaccagttctccctaaggctgagttctatgaccgctgcggacacggccgtgtattattgtgcgagagttctttgtggtagtaccagctgctactactttgactactggggccagggagccctggtcaccgtctcctc

SEQ ID NO: 965 - DNA, 361 bp, synthetic construct
  misc_feature 1..361: note = Synthetic
  source 1..361: mol_type = other DNA
caggtgcagctggtggagtctgggggaggcgtggtccagcctgggaggtccctgagactctcctgtgcagcctctggattcaccttcagtagctatgctatgcactgggtccgccaggctccaggcaaggggctagagtgggtggcagttatatcatatgatggaagtaataaatactacgcagactccgtgaagggccgattcgccatctccagagacaattccaggaacacatcgtttctgcaaatgaacagcctgagggccgaggacacggctctctattactgtgcgcgagatcgtttggctggttccaactactttgactactggggccacggaaccctggtctccgtctcctcag

SEQ ID NO: 966 - DNA, 328 bp, synthetic construct
  misc_feature 1..328: note = Synthetic
  source 1..328: mol_type = other DNA
gaaattgtgttgacacagtctccagtcaccctgtctttgtctccagggcaaagagccaccctctcctgcagggccagtcagagtgttggcagattcttagcctggtaccagcagagacctggccaggctcccaggctcctcatctatgatacatccaacagggccactggcatccctgccaggttcagtggcagtgggtctgagacagacttcactctcaccatcagcagcctagagcctgaagattttgcagtttattactgtcagcagcgtggcacctggcctccggcaatcactttcggccctgggaccaaagtggatatcaaac

SEQ ID NO: 967 - DNA, 361 bp, synthetic construct
  misc_feature 1..361: note = Synthetic
  source 1..361: mol_type = other DNA
caggtgcagctggtggagtctgggggaggcgtggtccagcctgggaggtccctgagactctcctgtgaagcgtctggattcaccttcagtagtcatggcatacactgggtccgccaggctccaggcaaggggctggagtggctggcagttatatggtatgatggaaataataagttctatgcggactccgtgaagggccgattcaccatctccagagacaattccaggaacacattgtttctgcaaatgaacagcctgagggccgaggacacggctctctattactgtgcgcgagaccgtttggctggttccaactactttgacttctggggccacggaaccctggtcaccgtctcctcag

SEQ ID NO: 968 - DNA, 325 bp, synthetic construct
  misc_feature 1..325: note = Synthetic
  source 1..325: mol_type = other DNA
gaaattgtgttgacacagtctccagtcaccctgtctttgtctccagggcaaagagccaccctctcctgcagggccagtcagagtgttggcagattcttagcctggtaccagcagaaacctggccaggctcccaggctcctcatctatgatacatccaacagggccactggcgtccctgacaggttcagtggcagtgggtctgagacagacttcactctcaccatctacagcctagagcctgacgattctgcagtttattactgtcagcagcgtggcacctggcctccggcaatcactttcggccctgggaccaaagtggatatca

SEQ ID NO: 969 - DNA, 361 bp, synthetic construct; identical to SEQ ID NO: 967
  misc_feature 1..361: note = Synthetic
  source 1..361: mol_type = other DNA

SEQ ID NO: 970 - DNA, 325 bp, synthetic construct; identical to SEQ ID NO: 968
  misc_feature 1..325: note = Synthetic
  source 1..325: mol_type = other DNA

SEQ ID NO: 971 - DNA, 366 bp, synthetic construct
  misc_feature 1..366: note = Synthetic
  source 1..366: mol_type = other DNA
caggtccagctggtacagtctggggctgaggtgaagaagcctggggcctcagtgaaggtctcctgcaaggtttccggatacaccctcattgaattatccatgcactgggtgcgacaggctcctggaaaagggcttgagtggatgggaggttttgatcctgaagatggtgaaacaatctacgcacagaagttccagggcagagtcaccatgaccgaggacacatctacagacacagcctacatggagctgagcagcctgagatctgaggacacggccgtgtattactgtgcaacagcgggtcctcttccctactactactactgtatggacgtctggggccaagggaccacggtcaccgtctcctca

SEQ ID NO: 972 - DNA, 328 bp, synthetic construct
  misc_feature 1..328: note = Synthetic
  source 1..328: mol_type = other DNA
gaaattgtgttgacgcagtctccaggcaccctgtctttgtctccaggggaaagagccaccctctcctgcagggccagtcagagtgttagtagcaggtacttagcctggtaccagcagaaacctggccaggctcccaggctcctcatctatggtgcatccagcagggccactggcatcccagacaggttcagtggcagtgggtctgggacagacttcactctcaccatcagcagactggagcctgaagattttgcagtgtattactgtcagcagtatggtagctcacctatgtacacttttggccaggggaccaagctggagatcaaac

SEQ ID NO: 973 - DNA, 385 bp, synthetic construct
  misc_feature 1..385: note = Synthetic
  source 1..385: mol_type = other DNA
gaggtgcagctggtgcagtctggagcagaggtgaaaaagccgggggagtctctgaagatctcctgtaagggttctggatacagctttaccagtcactggatcggctgggtgcgccagatgcccgggaaaggcctggagtggatggggatcatctatcctggtgactctgataccagatacagcccgtccttccaaggccaggtcaccatctcagccgacaagtccatcagcaccgcctacctgcagtggagcagcctgaaggcctcggacaccgccatgtattactgtgcgagaccggattgtgtgaattgttgtagtggtggtagctgctactttgatgcttttgatatttggggccaagggacaatggtcaccgtctcttcag

SEQ ID NO: 974 - DNA, 340 bp, synthetic construct
  misc_feature 1..340: note = Synthetic
  source 1..340: mol_type = other DNA
gatattgtgatgacccagactccactctccctgcccgtcacccctggagagccggcctccatctcctgcaggtctagtcagagcctcttggatagtgatgatggaaacacctatttggactggtacctgcagaagccagggcagtctccacagctcctgatctatacgctttcctatcgggcctctggagtcccagacaggttcagtggcagtgggtcaggcactgatttcacactgaaaatcagcagggtggaggctgaggatgttggagtttattactgcatgcaacgtatagagtttccgtggacgttcggccaagggaccaaggtggaaatcaaac

SEQ ID NO: 975 - DNA, 370 bp, synthetic construct
  misc_feature 1..370: note = Synthetic
  source 1..370: mol_type = other DNA
cagctgcagctgcaggagtcgggcccaggactggtgaagccttcggagaccctgtccctcacctgcactgtctctggtggctccatcagcagtagtacttactactggggctggatccgccagcccccagggaaggggctggagtggattgggaatatcttctatagtgggagcacctactacaacccgtccctcaagagtcgagtcaccatatccgtagacacgtccaagaaccacttctccctgaggctgagctctgtgaccgccgcagacacggctgtgtattactgtgcgagacatggggatacctattactatgaaagtacccttgattactggggccagggaaccctggtcaccgtctcctcag

SEQ ID NO: 976 - DNA, 322 bp, synthetic construct
  misc_feature 1..322: note = Synthetic
  source 1..322: mol_type = other DNA
gacatccagatgacccagtctccatcctccctgtctgcatctgtaggagacagagtcaccatcacttgccgggcaagtcagggcattagaaatgatttaggctggtatcagcagaaaccagggaaagcccctaagcgcctgatctatgctgcatccagtttgcaaagtggagtcccatcaaggttcagcggcagtggatctgggacagaattcactctcacaatcagcagcctgcagcctgaagattttgcaacttattactgtctacagcataatagttaccctctcactttcggcggagggaccaaggtggagatcaaac

SEQ ID NO: 977 - DNA, 367 bp, synthetic construct
  misc_feature 1..367: note = Synthetic
  source 1..367: mol_type = other DNA
caggttcagctggtgcagtctggagctgaggtgaagaagcctggggcctcagtgaaggtctcctgcaaggcttctggttacacctttaccagctacggtatcagctgggtgcgacaggcccctggacaggggcttgagtggatgggatggatcagcggttacgatggtaacacaaactatgcacagaaggtccagggcagagtcaccatgaccacagacacatccacgagcacagcctacatggagctgaggagcctgagatctgacgacacggccgtgtattactgtgcgagagatcaccggacggtgactacgttcgggacctttgactactggggccagggaaccctggtcaccgtctcctcag

SEQ ID NO: 978 - DNA, 322 bp, synthetic construct
  misc_feature 1..322: note = Synthetic
  source 1..322: mol_type = other DNA
gacatccagatgacccagtctccatcctccctgtctgcatctgtaggagacagagtcaccatcacttgccgggcaagtcagagcattggctattatttaaattggtatcagcagaaaccagggaaagcccctaagctcctgatctatgctgcagccagtttgcaaagtggggtcccatcaaggttcagtggcagtggatctgggacagatttcactctcaccatcagcagtctgcaacctgaagattttgcaacttactactgtcaacagagttacagtaccccattcactttcggccctgggaccaaagtggatatcaaac

SEQ ID NO: 979 - DNA, 364 bp, synthetic construct
  misc_feature 1..364: note = Synthetic
  source 1..364: mol_type = other DNA
caggtgcagctacagcagtggggcgcaggactgttgaagccttcggagaccctgtccctcacatgcgctgtctatggtgggtccttcagtggttactactggagctggatccgccagcccccagggaaggggctggagtggattggggaaatcattcatagtggaagcaccaactacaacccgtccctcaagagtcgactcaccatatcactagacacgtccaagaaccagttctccctgaggctgagctctgtgaccgccgcggacacggctgtgtattactgtgcgagaggccaccctatgatagtcgtggttaaggggttcgacccctggggccagggaaccctggtcaccgtctcctcag

SEQ ID NO: 980 - DNA, 322 bp, synthetic construct
  misc_feature 1..322: note = Synthetic
  source 1..322: mol_type = other DNA
gacatccagatgacccagtctccatcctccctgtctgcatctgtaggagacagagtcaccatcacttgccgggcaagtcagggcattagaaatgatttaggctggtatcagcagaaaccagggaaagcccctaagcgcctgatctatgctgcatccagtttgcaaagtggggtcccatcaaggttcagcggcagtggatctgggacagaattcactctcacaatcagcagcctgcagcctgaagattttgcaacttattactgtctacagcataatagttaccctcggacttttggccaggggaccaagctggagatcaaac

SEQ ID NO: 981 - DNA, 373 bp, synthetic construct
  misc_feature 1..373: note = Synthetic
  source 1..373: mol_type = other DNA
gaggtgcagctggtggagtctgggggaggcttggtccagcctggggggtccctgagactctcctgtgcagcctctggattcacttttagtagctattggatgagctgggtccgccaggctccagggaaggggctggagtgggtggccaacatgaagcaagatggaagtgagaaatactatgtggactctgtgaagggccgattcaccatctccagagacaacgccaagaactcactgtatctgcaaatgaacagcctgagagccgaggacacggctgtgtattactgtgcgagaggggcccgatttttggagtggttaccccagtccccttttgactactggggccagggaaccctggtcaccgtctcctcag

SEQ ID NO: 982 - DNA, 319 bp, synthetic construct
  misc_feature 1..319: note = Synthetic
  source 1..319: mol_type = other DNA
gacatccagatgacccagtctccatcctccctgtctgcatctctgggagacagagtcaccatcacttgccgggcgagtcagggcattagcaattctttagcctggtatcagcagaaaccagggaaagcccctaagctcctgctctatgctgcatccagattgggaagtggggtcccatccaggttcagtggcagtggatctgggacggattacactctcaccatcagcagcctgcagcctggagattttgcagcttattactgtcaacagtattatagtacccctctcactttcggcggagggaccaaggtggagatca

SEQ ID NO: 983 - DNA, 384 bp, synthetic construct
  misc_feature 1..384: note = Synthetic
  source 1..384: mol_type = other DNA
caggtccagctggtacagtctggggctgaggtgaagaagcctggggcctcagtgaaggtctcctgcaaggtttccggatacaccctcattgagttatccatgcactgggtgcgacaggctcctggaaaagggcttgagtggatgggaggttttgatcctgaagttggtgagacactctacgcaccgaagttccagggcagagtcaccatgaccgaggacacatctacagacacagcctacatggagctgagcagcctgagctctgaggacacggccctgtattactgtgcaacagcagtagcagtggctggtactcccactaattactactactactacggtatagacgtctggggccaagggaccacggtcaccgtctcctca

SEQ ID NO: 984 - DNA, 331 bp, synthetic construct
  misc_feature 1..331: note = Synthetic
  source 1..331: mol_type = other DNA
cagtctgtgctgactcagccaccctcagcgtctgggacccccgggcagagggtcaccatctcttgttctggaagcaggtccaacatcggaagtaattatgtatactggtaccagcaactcccaggaacggcccccaaactgctcatctataggaataatcagcggccctcaggggtccctgaccgattctctggctccaagtctggcacctcagcctccctggccatcggtgggctccggtccgaggatgaggctgattattactgtgcagcaagggatgacagcctgagtggttgggtgttcggcggagggaccaagctgaccgtcctag

SEQ ID NO: 985 - DNA, 384 bp, synthetic construct
  misc_feature 1..384: note = Synthetic
  source 1..384: mol_type = other DNA
caggtccagctggtacagtctggggctgaggtgaagaagcctggggcctcagtgaaggtctcctgcaaggtttccggatacaccctcactgaattatccatgcactgggtgcgacaggctcctggaaaagggcttgagtggatgggaggttttgatcctgaagatggtgaaacaatctacgcacagaagttccagggcagagtcaccatgaccgaggacacatctacagacacagcctacatggagctgagcagcctgagatctgaggacacggccgtgtactactgtgcaaccggatacgcagtgactggtaccccccaaaattactcctactactacggtatggacgtctggggccaagggaccacggtcaccgtctcctca

SEQ ID NO: 986 - DNA, 322 bp, synthetic construct
  misc_feature 1..322: note = Synthetic
  source 1..322: mol_type = other DNA
gaaattgtgttgacgcagtctccaggcaccctgtctttgtctccaggggaaagagccaccctctcctgcagggccagtcagagtgttagcagcagctgcttagcctggtaccagcagaaacctggccaggctcccaggctcctcatctatggtgcatccggcagggccactggcatcccagacaggttcagtggcagtgggtctgggacagacttcactctcaccatcagcagactggagcctgaagattttgcagtgtattactgtcagcagtatggtagctcacattcctttggccaggggaccaagctggagatcaaac

SEQ ID NO: 987 - DNA, 385 bp, synthetic construct
  misc_feature 1..385: note = Synthetic
  source 1..385: mol_type = other DNA
gaggtgcagctggtggagtctgggggaggcctggtcaagcctggggggtccctgagactctcctgtgcagcctctggattcaccttcagtagctataccatgaactgggtccgccaggctcccgggatggggctggagtgggtctcatccattagtagtagtagtagttacatatactacgtagactcagtgaagggccgattcaccatctccagagacaacgccaagaactcactgtatctgcaaatgaacagcctgagagccgaggacacggctgtgtattactgtgcgagagattctgcccggtggttccatgatagtagtggttattacccctctgattttgactactggggccagggaaccctggtcaccgtctcctcag

SEQ ID NO: 988 - DNA, 325 bp, synthetic construct
  misc_feature 1..325: note = Synthetic
  source 1..325: mol_type = other DNA
gaaatagtgatgacgcagtctccagccaccctgtctgtgtctccaggggaaagagccaccctctcctgcagggccagtcagagtgttagcagcaacttagcctggtaccagcagaaacctggccaggctcccaggctcctcatctatggtgcatccaccagggccactggtatcccagccaggttcagtggcagtgggtctgggacagagttcactctcaccatcagcagcctgcagtctgaagattttgcagtttattactgtcagcattattataactggcctccgtggacgttcggccaagggaccaaggtggaaatcaaac

SEQ ID NO: 989 - DNA, 387 bp, synthetic construct
  misc_feature 1..387: note = Synthetic
  source 1..387: mol_type = other DNA
caggttcagctggtgcagtctggagctgaggtgaagaagcctggggcctcagtgaaggtctcctgcaaggctgctggttacacctttaccagctatggtatcagctgggtgcgacaggcccctggacaagggcttgagtggatgggatggatcagcgcttacaatggtaacacaaagtatgcacagaagctccagggcagagtcaccatgaccacagagacatccacgagcacagtctacatggagctgaggagcctgagatctgacgacacggccgtgtattactgtgcgagagatggcgagatgggagggagttatcgttatgtggactactactactacggtatggacgtctggggccaagggaccacggtcaccgtctcctca

SEQ ID NO: 990 - DNA, 319 bp, synthetic construct
  misc_feature 1..319: note = Synthetic
  source 1..319: mol_type = other DNA
tcctatgagctgactcagccaccctcagtgtccgtgtccccaggacagacagccagcatcacctgctctggagataaattgggggataaatatgcttgctggtatcagcagaagccaggccagtccccagtgctggtcatctatcaagatagcaagcggccctcagggatccctgagcgattctctggctccaactctgggaacacagccactctgaccatcagcgggacccaggctatggatgaggctgactattactgtcaggcgtgggacagcagcactgctgtattcggcggagggaccaagctgaccgtcctag

SEQ ID NO: 991 - DNA, 388 bp, synthetic construct
  misc_feature 1..388: note = Synthetic
  source 1..388: mol_type = other DNA
gaggtgcagctgttggagtctgggggaggcttggtacagcctggggggtccctgagactctcctgtgcagcctctggattcacctttagcagctatgccatgagctgggtccgccaggctccagggaaggggctggagtgggtctcaggtattagtggtagtggtggtagcacatactacgcagactccgtgaagggccggttcatcatctccagagacaattccaagaacacggtgtatctgcaaatgaacagcctgagagtcgaggacacggccgtatattactgtgcgaaatgtattcggtattactatggttcggggagttattataagcccacggggtggttcgacccctggggccagggaaccctggtcaccgtctcctcag

SEQ ID NO: 992 - DNA, 322 bp, synthetic construct
  misc_feature 1..322: note = Synthetic
  source 1..322: mol_type = other DNA
gacatccagatgacccagtctccatcctccctgtctgcatctgtaggagacagagtcaccatcacttgccaggcgagtcaggacattagcaactatttaaattggtatcaccagaaaccagggaaagcccctaagctcctgatctacgatgcatccaatttggaaacaggggtcccatcaaggttcagtggaagtggatctgggacagattttactttcaccatcagcagcctgcagcctgaagatattgcaacatattactgtcaacagtatgataatctccctctcactttcggcggagggaccaaggtggagatcaaac

SEQ ID NO: 993 - DNA, 378 bp, synthetic construct
  misc_feature 1..378: note = Synthetic
  source 1..378: mol_type = other DNA
gaggtgcagctggtggagtccgggggaggcttagttcagcctggggggtccctgagactctcctgtgtagcctctggactcacccccagtacctactggatgcactgggtccgccaagctccagggaaggggctggtgtgggtctcacgtattagtagtgatgggagtactacaaactacgcggactccgtgaagggccgattcaccatgtccagagacaacgccaagaacacgctgtatctgcaaatgaacagtctgagagccgaggacacggctgtgtattattgtgcaaaggggcccggaggttcgggagtttattacttctacttctactacatggacgcctggggcaaagggaccacggtcaccgtctcctca

SEQ ID NO: 994 - DNA, 322 bp, synthetic construct
  misc_feature 1..322: note = Synthetic
  source 1..322: mol_type = other DNA
gaaattgtgttgacgcagtctccaggcaccctgtctttgtctccaggggaaagagccaccctctcctgcagggccagtcagagtgttagcagcaactacttaacctggtaccagcagaaacctggccaggctcccaggctcctcatctatggtgcatccagcagggccactggcatcccagacagatttagtggcagtgggtctgggacagacttcactctcaccatcaacagactggagcctgaagattttgcagtgtattactgtcagcagtatggtagcttgtacacttttggccaggggaccaagctggagatcaaac

SEQ ID NO: 995 - DNA, 361 bp, synthetic construct
  misc_feature 1..361: note = Synthetic
  source 1..361: mol_type = other DNA
caggtgcagctgcaggagtcgggcccaggactggtgaagccttcggggaccctgtccctcacctgcgctgtctctggtggctccatcagcagtagtaactggtggagttgggtccgccagcccccagggaaggggctggagtggattggggaaatctatcatagtgggagcaccaactacaacccgtccctcaagaatcgagtcaccatatcagtagacaagtccaagaaccagttctccctgaatctgagctctgtgaccgccgcggacacggccgtgtattactgtgcgagagaccaaggggcgacaaggagggagcttgcctactggggccagggaaccctggtcaccgtctcctcag

SEQ ID NO: 996 - DNA, 331 bp, synthetic construct
  misc_feature 1..331: note = Synthetic
  source 1..331: mol_type = other DNA
cagtctgccctgactcagcctgcctccgtgtctgggtctcctggacagtcgatcaccatctcctgcactggaaccagcagtgatgttgggagttataaccttgtctcctggttccaacagcacccaggcaaagcccccaaactcatgatttatcaggtcagtaagcggccctcaggggtttctaatcgcttctctggctccaagtctggcaacacggcctccctgacaatctctgggctccaggctgaggacgaggctgattattactgctactcatatgcaggtagtagcacttgggtgttcggcggagggaccaagctgaccgtcctag

SEQ ID NO: 997 - DNA, 382 bp, synthetic construct
  misc_feature 1..382: note = Synthetic
  source 1..382: mol_type = other DNA
gaggtgcagctgttggagtctgggggaggcttggtacagcctggggggtccctgagactctcctgtgcagcctctggattcacctttagcagctatgccatgagctgggtccgccaggctccagggaaggggctggagtgggtctcagctattagtggtagtggtggtagcacatactacgcagactccgtgaagggccggttcaccatctccagagacaattccaagaacacgctgtatctgcaaatgaacagcctgagagccgaggacacggccgtatattactgtgcgaaaggggtcagactggtaccgggtgacttttgggataactactggtacttcgatctctggggccgtggcaccctggtcaccgtctcctcag

SEQ ID NO: 998 - DNA, 331 bp, synthetic construct
  misc_feature 1..331: note = Synthetic
  source 1..331: mol_type = other DNA
cagtctgccctgactcagcctccctccgcgtccgggtctcctggacagtcagtcaccatctcctgcactggaaccagcagtgacgttggtggttataactatgtctcctggtaccaacagcacccaggcaaagcccccaaactcatgatttatgaggtcagtaagcggccctcaggggtccctgatcgcttctctggctccaagtctggcaacacggcctccctgaccgtctctgggctccaggctgaggatgaggctgattattactgcagctcatatgcaggcagcaacaatttggtattcggcggagggaccaagctgaccgtcctag

SEQ ID NO: 999 - DNA, 364 bp, synthetic construct
  misc_feature 1..364: note = Synthetic
  source 1..364: mol_type = other DNA
caggtccagctggtacagtctggggctgaggtgaagaagcctggggcctcagtgaaggtctcctgcaaggtttccggattcaccctcactgaattatccatccactgggtgcgacaggctcctggaaaagggcttgagtggatgggaggttttgatcctgaagatgctgaaacaatctacgcacagaggttccagggcagagtcaccatgaccgaggacacatctacagacacagcctacatggagctgagcaggctgagatctgaggacacggccgtgtattactgtgcaacaggtagccccctagtcccggagagctggttcgacccctggggccagggaaccctggtcaccgtctcctcag

SEQ ID NO: 1000 - DNA, 319 bp, synthetic construct
  misc_feature 1..319: note = Synthetic
  source 1..319: mol_type = other DNA
tcctatgagctgactcagccaccctcagtgtccgtgtccccaggacagacagccagcatcacctgctctggagataaattgggggataaatatgcttgctggtatcagcagaagccaggccagacccctgtgttggtcatctatcaagatagtaagcggccctcagggatccctgagcgattctctggctccaactctgggaacacagccactctgaccatcagcgggacccaggctatggatgaggctgactattactgtcaggcgtgggacagcagcactgtggtattcggcggagggaccaagctgaccgtcctag

SEQ ID NO: 1001 - DNA, 376 bp, synthetic construct
  misc_feature 1..376: note = Synthetic
  source 1..376: mol_type = other DNA
caggtccagctggtacagtctggggctgaggtgaagaagcctggggcctcagtgaaggtctcctgcaaggtttccggatacactctcatagaattatccatgcactgggtgcgacaggctcctggaaaagggcttgagtggatgggaggttttgatcctgaagatggtgaaacaatctacgcacagaagttccagggcagagtcaccatgaccgaggacacatctacagacacagcctacatggagctgaacagcctgagatctgaggacacggccgtgtattactgtgcaacagcccctccatattgtagtggtggtagttgttccaactggttggacccctggggccagggaaccctggtcaccgtctcctcag

SEQ ID NO: 1002 - DNA, 328 bp, synthetic construct
  misc_feature 1..328: note = Synthetic
  source 1..328: mol_type = other DNA
tcctatgagctgactcagccaccctcggtgtcagtggccccaggacagacggccaggattacctgtgggggaaacaacattggaagtaaaagtgtgcactggtaccagcagaagccaggccaggcccctgtactggtcgtctatgatgatagcgaccggccctcagggatccctgagcgattctctggctccaactctgggaacacggccaccctgaccatcagcagggtcgaagccggggatgaggccgactattactgtcaggtgtgggatagtagtcctgatcatccggtggtgttcggcggagggaccaagctgaccgtcctag

SEQ ID NO: 1003 - DNA, 376 bp, synthetic construct
  misc_feature 1..376: note = Synthetic
  source 1..376: mol_type = other DNA
gaggtgcagctggtgcagtccggagcagaggtgaaaaagcccggggagtctctgaggatctcctgtaagggttctggatacagctttacccactactggatcagctgggtgcgccagatgcccgggaaaggcctggagtggatggggaggattgatcctagtgactcttataccaactacagcccgtccttccaaggccacgtcaccatctcagctgacaagtccatcaccactgcctacctgcagtggagcagcctgaaggcctcggacaccgccatctattactgtgcgagagagccgcgtattacgatttttggagtgatggagaactggttcgacccctggggccagggaaccctggtcaccgtctcctcag

SEQ ID NO: 1004 - DNA, 331 bp, synthetic construct
  misc_feature 1..331: note = Synthetic
  source 1..331: mol_type = other DNA
cagtctgtgctgactcagccaccctcagcgtctgggacccccgggcagagggtcaccatctcttgttctggaagcagctccaacatcggaagtaattatgtatactggtaccagcagctcccaggaacggcccccaaactcctcatctatagtaataatcagcggccctcaggggtccctgaccgattctctggctccaagtctggcacctcagcctccctggccatcagtgggctccggtccgaggatgaggctgattattactgtgcagcatgtgatgacagcctgagtggttgggtgttcggcggagggaccaagctgaccgtcctag

SEQ ID NO: 1005 - DNA, 388 bp, synthetic construct
  misc_feature 1..388: note = Synthetic
  source 1..388: mol_type = other DNA
caggtgcagctgcaggagtcgggcccaggactggtgaagccttcacagaccctgtccctcacctgcactgtctctggtggctccatcagcagtggtagttactactggagctggatccggcagcccgccgggaagggactggagtggattgggcgtatctatatcactgggagcaccaactacaacccctccctcaagagtcgagtcaccatatcagtagacacgtccaagaaccagttctccctgaagctgagctctgtgaccgccgcagacacggccgtgtattactgtgcgagagatccgcaccgtctctattactatgatagtagtggttatgcaaatgcttttgatatctggggccaagggacaatggtcaccgtctcttcag

SEQ ID NO: 1006 - DNA, 331 bp, synthetic construct
  misc_feature 1..331: note = Synthetic
  source 1..331: mol_type = other DNA
cagtctgccctgactcagcctgcctccgtgtctgggtctcctggacagtcgatcaccatctcctgcactggaacgagcagtgatgttgggagttataaccttgtctcctggtaccaacagcacccaggcaaagcccccaaattcctgatttatgaggtcaataagcggccctcaggggtttctaatcgcttctctggctccaagtctggcaacacggcctccctgacaatctctgggctccaggctgaggacgaggctgattattactgctgctcatatgcaggtagtatcatttgggtgttcggcggagggaccaagctgaccgtcctag

SEQ ID NO: 1007 - DNA, 373 bp, synthetic construct
  misc_feature 1..373: note = Synthetic
  source 1..373: mol_type = other DNA
caggtgcagctggtgcagtctggggctgaggtgaagaagcctgggtcctcggtgaaggtctcctgcaaggcttctggaggcaccttcagcagctatactttcagctgggtgcgacaggcccctggacaagggcttgagtggatgggaaggatcatccctatccttggtatagcagactacgcacagaagttccagggcagagtcacaattaccgcggacaaatccacgagcacagcctacatggagctgagcagcctgagatctgaggacacggccgtgtattactgtgcgagaatgaactcgggtacactcgtgaacggggagttaacgtcggactactggggccagggaaccctggtcaccgtctcctcag

SEQ ID NO: 1008 - DNA, 322 bp, synthetic construct
  misc_feature 1..322: note = Synthetic
  source 1..322: mol_type = other DNA
gacatccagatgacccagtctccatcctccctgtctgcatctgtaggagacagagtcaccatcacttgccgggcaagtcagagcattagcagctatttaaattggtatcagcagaagccagggaaagtccctaagctcctgatctatgctgcatccagtttgcaaagtggggtcccatcaaggttcagtggcagtggatctgggacagatttcactctcaccatcagcagtctgcaacctgaagattttgcaacttactactgtcaacagagttacattaccccgatcaccttcggccaagggacacgactggagattaaac

SEQ ID NO: 1009 - DNA, 373 bp, synthetic construct
  misc_feature 1..373: note = Synthetic
  source 1..373: mol_type = other DNA
caggttcagctggtgcagtctggagctgaggtgaagaagcctggggcctcagtgaaggtctcctgcaaggcttctggttacacctttagtagctatggtatcagctgggtgcgacaggcccctggacaagggcttgagtggatgggatggaccagcacttacaatggtaacacaaactatgcacagaagctccagggcagagtcaccatgaccacagacacatccacgaacacagcctacatggagctgaggagcctgagatctgacgacacggccgtgtattactgtgcgagagtcccctctgacgcatattacaatgataggactgactttgactactggggccagggaaccctggtcaccgtctcctcag

SEQ ID NO: 1010 - DNA, 319 bp, synthetic construct
  misc_feature 1..319: note = Synthetic
  source 1..319: mol_type = other DNA
tcctatgagctgactcagccaccctcagtgtccgtgtccccaggacagacagccagcatcacctgctctggagataaattggaggataaatatgcttgctggtatcagcagaagccaggccagtcccctgtgctggtcatctatcaagatagcaagcggccctcagggatccctgagcgattctctggctccaactctgggaacacagccactctgaccatcagcgtgacccaggctatggatgaggctgactattactgtcaggcgtgggacagcagcactgcagtattcggcggagggaccaagctgaccgtcctag

SEQ ID NO: 1011 - DNA, 384 bp, synthetic construct
  misc_feature 1..384: note = Synthetic
  source 1..384: mol_type = other DNA
caggtccagctggtacagtctggggctgaggtgaagaagcctggggcctcagtgaaggtctcctgcaaggtttccggatacaccctcactgaattatccgtgcactgggtgcgacaggttcctggaaaagggcttgagtggatgggaggttttgatcctgaagatggtgaaacaatctacgcacagaagttccagggcagagtcaccatgaccgaggacacatctacagacacagcctacatggagctgagcagcctgagatctgaggacacggccgtctattactgtgcaacagggacggcagtggctggtacaccccaagcttactactactactacggtatggacgtctggggccaagggaccacggtcaccgtctcctca

SEQ ID NO: 1012 - DNA, 322 bp, synthetic construct
  misc_feature 1..322: note = Synthetic
  source 1..322: mol_type = other DNA
gacatccagatgacccagtctccatcctccctgtctgcatctgtaggagacagagtcaccatctcttgccgggcgagtcagggcattagcaattctttagcctggtatcagcagaaaccagggaaagcccctaagctcctgctctatgctgcatccagattggaaagtggggtcccatccaggttcagtggcagtggctctgggacggattacactctcaccatcagcagcctgcagcctgaagattttgcaacttattactgtcaacagtattatagtacccctgtaacttttggccaggggaccaagctggagatcaaac

SEQ ID NO: 1013 - DNA, 373 bp, synthetic construct
  misc_feature 1..373: note = Synthetic
  source 1..373: mol_type = other DNA
caggtgcagctggtggagtctgggggaggcgtggtccagcctgggaggtccctgagactctcctgtgcagcgtctggattcaccttcagtaactatggcatgcactgggtccgccaggctccaggcaaggggctggagtgggtggcagttatatggtatgatggaagtaataaatactatgcaggctccgtgaagggccgcttcaccatctccagagacaattccaagaacacgctgtatctgcaaatgaacagcctgagagccgaggacgcggctgtgtattactgtgcgagaccatcgggtatagcagcagctgggggcggctactactttgactactggggccagggaaccctggtcaccgtctcctcag

SEQ ID NO: 1014 - DNA, 331 bp, synthetic construct
  misc_feature 1..331: note = Synthetic
  source 1..331: mol_type = other DNA
cagtctgccctgactcagcctgcctccgtgtctgggtctcctggacagtcgatcaccatctcctgcactggaaccagcagtgacgttggtacttataactatgtctcctggtaccaacagcacccaggcaaagcccccaaactcatgatttatgaggtcagtaatcggccctcaggggtttctaatcgcttctctggctccaagtctggcaacacggcctccctgaccatctctgggctccaggctgaggacgaggctgattattactgcagctcatatacaagcagcagcactcgggtgttcggcggagggaccaagctgaccgtcctag

SEQ ID NO: 1015 - DNA, 363 bp, synthetic construct
  misc_feature 1..363: note = Synthetic
  source 1..363: mol_type = other DNA
gaggtgcagctgttggagtctgggggaggcttggtacagcctggggggtccctgagactctcctgtgcagcctctagattcacctttagcagctatgccatgaactgggtccgccaggctccagggaaggggctggagtgggtctcaactattagtggtagtggtggtagcacatacttcgcagactccgtgaagggccggttcaccatctccagagacaattccaagaacacgctgtatctgcacatgaacagcctgagagccgaggacacggccgtatattactgtgcgaaaggtcggtggacactaactctgggcgttatggacgtctggggccaagggaccacggtcaccgtctcctca

SEQ ID NO: 1016 - DNA, 334 bp, synthetic construct
  misc_feature 1..334: note = Synthetic
  source 1..334: mol_type = other DNA
cagtctgccctgactcagcctgcctccgtctctgggtctcctggacagtcgatcaccatctcctgcactggaaccagcagtgacgttggtggttataactttgtctcctggtaccaacagcacccaggcaaagcccccaaactcatgatttatgaggtcagtaatcggccctcaggggtttctaatcgcttctctggctccaagtctggcaacacggcctccctgaccatctctgggctccaggctgaggacgaggctgattattactgcagctcatatacaagcagcagcactccttatgtcttcggaactgggaccaaggtcaccgtcctag

SEQ ID NO: 1017 - DNA, 352 bp, synthetic construct
  misc_feature 1..352: note = Synthetic
  source 1..352: mol_type = other DNA
caggtgcagctgcaggagtcgggcccaggactggtgaagccttcggggaccctgtccctcacctgcgctgtctctggtggctccatcagcagtagtaactggtggagttgggtccgccagcccccagggaaggggctggagtggattggggaaatctatcatagtgggagcaccaactacaacccgtccctcaagagtcgagtcaccatatcagtagacaagtccaagaaccagttctccctgaaggtgagctctgtgaccgccgcggacacggccgtgtattactgtgcgacagtgcccgcgggtactatctactactggggccagggaaccctggtcaccgtctcctcag

SEQ ID NO: 1018 - DNA, 331 bp, synthetic construct
  misc_feature 1..331: note = Synthetic
  source 1..331: mol_type = other DNA
cagtctgccctgactcagcctgcctccgtgtctgggtctcctggacagtcgatcaccatctcctgcactggaaccagcagtgatgttgggagttataaccttgtctcctggtaccaacatcacccaggcaaagcccccaaactcatgatttatgaggtcaataagcggccctcaggggtttcgattcgcttctctggctccaagtctggcaacacggcctccctgacaatctctgggctccaggctgaggacgaggctgattattactgctgctcatatgcaggttttagcacttatgtgttcggcggagggaccaagctgaccgtcctag

SEQ ID NO: 1019 - DNA, 351 bp, synthetic construct
  misc_feature 1..351: note = Synthetic
  source 1..351: mol_type = other DNA
caggtgcagctggtggagtctgggggaggcgtggtccagcctgggaggtccctgagactctcctgtgcagcctctggattcaccttcagtagctatgctatgcactgggtccgccaggctccaggcaaggggctggagtgggtggcacttatatcatatgatggaagcaataaatactacgcagactccgtgaagggccgattcaccatctccagagacaattccaagaccacgctgtatctgcaaatgaacagcctgagagctgaggacacggctgtgtattactgtgcgagacctgccggggccgacatggacgtctggggcaaagggaccacggtcaccgtctcctca

SEQ ID NO: 1020 - DNA, 319 bp, synthetic construct
  misc_feature 1..319: note = Synthetic
  source 1..319: mol_type = other DNA
tcctatgagctgactcaggcaccctcagtgtccgtgtccccaggacagacagccagcatcacctgctctggagataaattgggggataaatatgctggctggtatcaacagaggccaggccagtcccctgtgttagtcatctatcaagacagcaagcggccctcagggatccctgagcgattctctggctccaactctgggaacacagccactctgaccatcagcgggacccaggctatggatgaggctgactattactgtcaggcgtgggacagcagcactgtggtattcggcggagggaccaagctgaccgtcctag

SEQ ID NO: 1021 - DNA, 373 bp, synthetic construct
  misc_feature 1..373: note = Synthetic
  source 1..373: mol_type = other DNA
gaggtgcagctgttggagtctgggggaggcttggtacagcctggggggtccctgagactctcctgtgcagcctctggattcacctttagcagctatgccatgagttgggtccgccaggctccagggaaggggctggagtgggtctcaggtattagtggaagtggtggtagcacatactacgcagactccgtgaagggccggttcaccatctccagagacaattccaagaacacgctgtatctgcaaatgaacagcctgagagccgaggacacggccgtatattactgtgcgaaagatcaggacggtatagtgggagcccccggaaacgtatttgactactggggccagggaaccctggtcaccgtctcctcag

SEQ ID NO: 1022 - DNA, 319 bp, synthetic construct
  misc_feature 1..319: note = Synthetic
  source 1..319: mol_type = other DNA
tcctatgagctgactcagccaccctcagtgtccgtgtccccaggacagacagccagcatcacctgctctggagatacattgggggataaatatacttgctggtatcagcagaagccaggccagtcccctgtgctggtcatctatcaagatagcaagcggccctcagggatccctgagcgattctctggctccaactctgggaacacagccactctgaccatcagcgggacccaggctatggatgaggctgactactactgtcaggcgtgggacagcaggaatgcggttttcggcggagggaccaagctgaccgtcctag

SEQ ID NO: 1023 - DNA, 372 bp, synthetic construct
  misc_feature 1..372: note = Synthetic
  source 1..372: mol_type = other DNA
gaggtgcagctgttggagtctgggggaggcttggtacagcctggggggtccctgagactctcctgtgcagcctctggattcacctttagcagctatgccatgagctgggtccgccaggctccagggaaggggctggagtgggtctcaactattagtggtagtggtggtagcatatactacgcagactccgtgaagggccggttcaccatctccagagacaattccaagaacacgctgtatctgcaaatgaacagcctgagagccgaggacacggccgtatattactgtgcgaaagatgccgcggcagctcgtttccactactacttctacatggacgtctggggcaaagggaccacggtcaccgtctcctca

SEQ ID NO: 1024 - DNA, 337 bp, synthetic construct
  misc_feature 1..337: note = Synthetic
  source 1..337: mol_type = other DNA
cagtctgccctgactcagcctgcctccgtgtctgggtctcctggacagtcgatcaccatctcctgcactggaaccagcagtgatgttgggagttataaccttgtctcctggtaccaacaccacccaggcaaagcccccaaactcatgatttatgagggcagtaagcggccctcaggggtttcttatcgcttctctggctccaagtctggcaacacggcctccctgacaatctctgggctccaggctgaggacgaggctgattattactgctgctcatatgcaggtagtagcacttcctatgtgatattcggcggagggaccaagctgaccgtcctag

SEQ ID NO: 1025 - DNA, 352 bp, synthetic construct
  misc_feature 1..352: note = Synthetic
  source 1..352: mol_type = other DNA
gaggtgcagctgttggagtctgggggaggcttggtacagcctggggggtccctgagactctcctgtgcagcctctggattcacctttagcagctatgccatgagctgggtccgccaggctccagggaaggggctggagtgggtctcaggtattagtgctagtggtagtagcacataccacgcagactccgtgaagggccggttcaccatctccagagacaattccaagaacacgctgtatatgcaaatgaacagcctgagagccgaggacacggccgtatattactgtgcgaaagataggggggggtacctccagcactggggccagggcaccctggtcaccgtctcctcag

SEQ ID NO: 1026 - DNA, 319 bp, synthetic construct
  misc_feature 1..319: note = Synthetic
  source 1..319: mol_type = other DNA
tcctatgagctgactcagccaccctcagtgtccgtgtccccaggacagacagccagcatcacctgctctggagataaattgggggataaatatgcttgctggtatcagcagaagccaggccagtcccctgtactggtcatctatcaagataccaagcggccctcagggatccctgagcgattctctggctccaactctgggaacacagccactctgaccatcagcgggacccaggctatggatgaggctgactattactgtcaggcgtgggacagcagcacttatgtcttcggaactgggaccaaggtcacagtcctag

SEQ ID NO: 1027 - DNA, 352 bp, synthetic construct
  misc_feature 1..352: note = Synthetic
  source 1..352: mol_type = other DNA
gaggtgcagctgttggagtctgggggaggcttggtacagcctggggggtccctgagactctcctgtgcagcctctggattcacctttagcacctatgccatgagctgggtccgccaggctccagggaaggggctggagtgggtctcagctattagtagtagtggttatagcacatactacgcagactccgtgaagggccggttcaccatctccagagacaattccaagaacacgctgtatctgcaaatgaacagcctgagagccgaggacacggccgtatattactgtgcgaaagattccggggcagggtatgactactggggccagggaaccctggtcaccgtctcctcag

SEQ ID NO: 1028 - DNA, 318 bp, synthetic construct
  misc_feature 1..318: note = Synthetic
  source 1..318: mol_type = other DNA
tcctatgagctgactcagccaccctcagtgtccgtgtccccaggacagacagccagcatcacctgctctggagataaattgggggataaatatgcttgctggtatcagcagaagccaggccagtcccctgtgctggtcatctatcaagatagcaagcggccctcagggatccctgagcgattctctggctccaactctgggaacacagccactctgaccatcagcgggacccaggctatggatgaggctgactattactgtcaggcgtgggacagcagcactgtggtattcggcggagggaccaagctgaccgtccta

SEQ ID NO: 1029 - DNA, 352 bp, synthetic construct
  misc_feature 1..352: note = Synthetic
  source 1..352: mol_type = other DNA
gaggtgcagctgttggagtctgggggaggcttggtacagcctggggggtccctgagactctcctgtgcagcctctggattcacctttagcagctatgccatgagctgggtccgccaggctccagggaaggggctggagtgggtctcagctattagtggtagtggtggtaggacatactacgcagactccgtgaagggccggttcaccatctccagagacaattccaagaacaccctgtatctgctaatgaacagcctgagagccgaggacacggccgtatattactgtgcgaaggatcaaggtagtggttactccgactggggccagggaaccctggtcaccgtctcctcag

SEQ ID NO: 1030 - DNA, 319 bp, synthetic construct
  misc_feature 1..319: note = Synthetic
  source 1..319: mol_type = other DNA
tcctatgagctgacacagccaccctcagtgtccgtgtccccaggacagacagccaggatcacctgctctggagataaattgggggataaatatgtttgctggtatcaacagaagccaggccagtcccctgtgctggtcatctatcaagatagcaagcggccctcagggatccctgagcgattctctggctccaactctgggaacacagccactctgaccatcagcgggacccaggctatggatgaggctgactattactgtcaggcgtgggacagcagcactgtggtattcggcagagggaccaagctgaccgtcctag

SEQ ID NO: 1031 - DNA, 352 bp, synthetic construct
  misc_feature 1..352: note = Synthetic
  source 1..352: mol_type = other DNA
caggtgcagctggtggagtctgggggaggcgtggtccagcctgggaggtccctgagactctcctgtgcagcctctggattcaccttcagtagctatgctatgcactgggtccgccaggctccaggcaaggggctggagtgggtggcacttatatcatatgatggaagcaataaatactacgcagactccgtgaagggccgattcaccatctccagagacaattccaagaacacgctgtatctgcaaatgaacagcctgagagctgaggacacggctttttatttctgtgcgagagatggaggggggtactttgactactggggccagggaaccctggtcaccgtctcctcag

SEQ ID NO: 1032 - DNA, 319 bp, synthetic construct
  misc_feature 1..319: note = Synthetic
  source 1..319: mol_type = other DNA
tcctatgagctgactcagccaccctcagtgtccgtgtccccaggacagacagccagcatcacctgctctggagataaattgggggataaatatgcttgctggtatcagcagaagccaggccagtcccctgtgctggtcatctatcaagatagcaagcggccctcagggatccctgagcgattctctggctccaactctgggaacacagccactctgaccatcagcgggacccaggctatggatgaggctgactatcactgtcaggcgtgggacagtagcactgtggtattcggcggagggaccaagctgaccgtcctag

SEQ ID NO: 1033 - DNA, 381 bp, synthetic construct
  misc_feature 1..381: note = Synthetic
  source 1..381: mol_type = other DNA
gaggtgcagctgttggagtctgggggaggcttggtacagcctggggggtccctgagactctcctgtgcagcctctggattcacctttagcagcttgagctgggtccgccaggctccagggaaggggctggagtgggtctcaggtattagtggtagtggtggtagcacatactacgcagactccgtgaagggccggttcaccatctccagagacaactccaagaacacactgtatctgcaaatgaacagcctgagagccgaggacacggccgtatattactgtgcgaaagcccaaagaattacgatttttggagtggtcggccctgggagggggcacggtatggacgtctggggccaagggaccacggtcaccgtctcctca

SEQ ID NO: 1034 - DNA, 325 bp, synthetic construct
  misc_feature 1..325: note = Synthetic
  source 1..325: mol_type = other DNA
tcctatgagctgactcagccaccctcggtgtcagtggccccaggacagacggccaggattacctgtgggggaaacaacattggaagtaaaagtgtgcactggtaccagcagaagccaggccaggcccctgtgctggtcgtctatgatgatagcgaccggccctcagggatccctgagcgattctctggctccaactctgggaacacggccaccctgaccatcagcagggtcgaagccggggatgaggccgactattactgtcaggtgtgggatagtagtagtgatctcgttgtattcggcggggggaccaagctgaccgtcctag

SEQ ID NO: 1035 - DNA, 369 bp, synthetic construct
  misc_feature 1..369: note = Synthetic
  source 1..369: mol_type = other DNA
gaggtgcagctgttggagtctgggggaggcttggtacagcctggggggtccctgagactctcctgtgcagcctctggattcacctttaccagctatgccatgagctgggtccgccaggctccagggaaggggctggagtgggtctcaactattagtattactggtggtagcacatactacgcagactccgtgaagggccggttcaccatctccagagacaattccaagtacacgctgtatctgcaaatgaacagcctgagagccgaggacacggccgtatattactgtgcgaaagatccctactctgggatctcctactactactacatggacgtctggggcaaagggaccacggtcaccgtctcctca

SEQ ID NO: 1036 - DNA, 325 bp, synthetic construct
  misc_feature 1..325: note = Synthetic
  source 1..325: mol_type = other DNA
gaaattgtgttgacgcagtctccaggcaccctgtctttgtctccaggggaaagagccaccctctcctgcagggccagtcagagtgttagcagcagctacttagcctggtaccagcagaaacctggccaggctcccaggctcctcatctatggtgcatccagcagggccactggcatcccagacaggttcagtggcagtgggtctgggacagacttcactctcaccatcagcagactggagcctgaagattttgcagtgtattactgtcagcagtatggtagctcacctcgaacgttcggccaagggaccaaggtggaaatcaaac

SEQ ID NO: 1037 - DNA, 388 bp, synthetic construct
  misc_feature 1..388: note = Synthetic
  source 1..388: mol_type = other DNA
caggtgcagctggtggagtctgggggaggcgtggtccagcctgggaggtccctgagactctcctgtgcagcgtctggattcaccttcagtagctatggcatgcactgggtccgccaggctccaggcaaggggctggagtgggtggcagttatatggtatgatggaagtgataaatactatgcagactccgtgaagggccgattcaccatctccagagacaattccaagaacacgctgtatctgcaaatgaacagcctgagagctgaggacacggctgtgtattactgtgcgagagatgggacgggggaatttttggagtggttattaccagacgccttatactactttgactactggggccagggaaccctggtcaccgtctcctcag

SEQ ID NO: 1038 - DNA, 322 bp, synthetic construct
  misc_feature 1..322: note = Synthetic
  source 1..322: mol_type = other DNA
gacatccagatgacccagtctccatcctccctgtctgcatctgtaggagacagagtcaccatcacttgccgggcaagtcagagcattagcagctatttaaattggtatcagcacaaaccagggaaagcccctaagctcctgatctatgctgcatccaatttgcaaagtggggtcccatcaagattcagtggcagtggatctgggacagatttcactctcaccatcagcagtctgcaacctgaagattttgcaacttactactgtcaacagagttacagtatccctcccactttcggcggagggaccaaggtggagatcaaac

SEQ ID NO: 1039 - DNA, 388 bp, synthetic construct
  misc_feature 1..388: note = Synthetic
  source 1..388: mol_type = other DNA
caggtgcagctggtggagtctgggggaggcgtggtccagcctgggaggtccctgaaactctcctgtgcagcctctggattcaccttcagtagctatgctatgcactgggtccgccaggctccacgcaaggggctggagtgggtggcagttatatcatatgatggaagcaatgaatactacgcagactccgtgaagggccgattcaccatctccagagacaattccaagaacacgctgtatctgcaaatgaacagcctgagagctgaggacacggctgtgtattactgtgcgagagatgggacggggggatttttggagtggttattaccagacgccttattctactttgactactggggccagggaaccctggtcaccgtctcctcag

SEQ ID NO: 1040 - DNA, 322 bp, synthetic construct
  misc_feature 1..322: note = Synthetic
  source 1..322: mol_type = other DNA
gacatccagatgacccagtctccatcctccctgtctgcatctgtaggagacagagtcaccatcacttgccgggcaagtcagagcattagcagctatttaaattggtatcagcagaaaccagggaaagcccctaagctcctgatctatgctgcatccagtttgcaaagtggggtcccatcaaggttcagtggcagtgaatctgggacagatttcactctcaccatcagcagtctgcaacctgaagattttgcaacttactactgtcaacagagttacagtacccctcccactttcggcggagggaccaaggtggagatcaaac

SEQ ID NO: 1041 - DNA, 366 bp, synthetic construct
  misc_feature 1..366: note = Synthetic
  source 1..366: mol_type = other DNA
caggtccagctggtacagtctgggcctgaggtgaagaagcctggggcctcagtgaaggtctcatgcaaggtttccggatacaccctcattgaattaggcatgcactgggtgcgacaggctcctggaaaagggcttgagtggatgggaggttttgatcctgaaaatgtcaaaacgatctacgctcagaagtttcagggcagagtcaccatgaccgaggacacaagtacagacacagcctacatggagctgagaagtctgacatctgaggacacggccatatattactgtgcaacagcgggtcctcttccctactactactactgtttggacgtctggggccaagggaccacggtcaccgtctcctca

SEQ ID NO: 1042 - DNA, 328 bp, synthetic construct
  misc_feature 1..328: note = Synthetic
  source 1..328: mol_type = other DNA
gaaattgtgttgacgcagtctccaggcaccctgtctttgtctccaggggaaagagccaccctctcctgcagggccagtcagagtgttagcagcagctatctggcctggtaccgccagaaacctggccaggctcccaggctcctcatctatggtgcttccagcagggtcactggcatcccagacaggttcagtggcagtgggtctgggacagacttcactctcaccatcaacagactggagcctgaagattttgcagtgtattactgtcagtactatgatacctcacctatgtacacttttggccaggggaccaagctggagatcaaac

SEQ ID NO: 1043 - DNA, 385 bp, synthetic construct
  misc_feature 1..385: note = Synthetic
  source 1..385: mol_type = other DNA
gaggtgcagctggtgcagtctggagcagaggtgaaaaagccgggggagtctctgcagatctcctgtaagggttctggatacagattcagcaaccattggatcggctgggtgcgccaggtgcccgggaaaggcctggagtggatgggggtcatgaatcctggtcactctgaaagcacatatagcccgtccttccaaggccaggtcaccatctcagtcgacgagtccatcaataccgcctatctgcagtggagcagcctgaaggcctcggacaccgccatgtattactgtgcgagaccggactgtgtgaattgttgtagtggtggcagttgttatgttgatgcctttgatgtgtggggccaagggacaatggtcaccgtctcttcag

SEQ ID NO: 1044 - DNA, 340 bp, synthetic construct
  misc_feature 1..340: note = Synthetic
  source 1..340: mol_type = other DNA
gatattgtgatgacccagacgccactctccctgcccgtcacccctggagagtcggcctccatctcctgcaggtctagtcggagcctcttggataatgatgatggaaacacctatgtggactggtacctgcagaagccagggcagtctccgcagctcctgatgtatctgctttcctatcgggcctctggagtcccagacaggttcagtggcagtgggtcaggcactgatttcacactgagaattagcagggtggaggctgaggatgttggagtctattattgtatgcaacgtatagagtttccgtggacattcggccaagggaccaaggtggaaatcaaac

SEQ ID NO: 1045 - DNA, 370 bp, synthetic construct
  misc_feature 1..370: note = Synthetic
  source 1..370: mol_type = other DNA
cagctgcagctgcaggagtcgggcccaggactggtgaagccttcggagaccctgtccctcacctgcactgtctctggtggctccatcaccagtagtagtcactactggggctgggtccggcagcccccagggaaggggctggagtggattggcaatatcttttattctgggatcacctactccaacccgtccctcgagagtcgactcaccatattcgttgacacgtccaagaaccagttctccctgaaactgaggtctgtgaccgccgcagacacggctgtgtattactgtgcgagagatgtggagacatataagtatgaaagtacccttgactgctggggccagggaatcctggtcaccgtctcctcag

SEQ ID NO: 1046 - DNA, 319 bp, synthetic construct
  misc_feature 1..319: note = Synthetic
  source 1..319: mol_type = other DNA
gacatccagatgacccagtctccatcctccctgtctgcatctgttggagacagagtcaccatcacttgccgggcaagtcaggacattagaagtgatttaggctggtatcagcagaaaccagggaaagcccctaagcgcctcatctatgctgcatccagtttgcaaagtggggtcccatcaaggttcagcggcagtggatctgggacagaattcactctcacaatccacagcctgcagcctgaagattttgcaacttattactgtctgcagcataacagttaccctctcactttcggcggtgggaccaaggtggaaatca

SEQ ID NO: 1047 - DNA, 367 bp, synthetic construct
  misc_feature 1..367: note = Synthetic
  source 1..367: mol_type = other DNA
caggttcagctggtgcagtctggagctgaggtgaagaagcctggggcctcagtaaaggtctcctgcatggcttctggttacaacctctccaactacggtatcagctgggtgcgacaggcccctggacaagggcttgagtggatcgggtggagcagcgttgacaatggccacacaaactatgcacagaagttccaggctagagtctccatgaccacagacacatccacgagcacagtttatttggaactgaggagcctgagatctgacgacacggccgtctatttctgtgcgagagatcaccggacggtagttaccttcgggacctttgactactggggccagggagtcctggtcaccgtctcctcag

SEQ ID NO: 1048 - DNA, 321 bp, synthetic construct
  misc_feature 1..321: note = Synthetic
  source 1..321: mol_type = other DNA
gacatccagatgacccagtctccatcctccctgtctgcatctgttggagacagagtcaccatcacttgccgggcaagtcacaacattaacacctttttaaattggtatcagcagaagccagggaaagcccctaacctcctgatctatgctccctccattttgcaaagtggggtcccaccaaggttcagtggcagtggatttgggacagatttcactctcaccatcagcagtctgcaacctgatgattttgcaacgtactactgtcaacagacttaccgtaccccattcactttcggccctgggaccaaagtggatatcaaa

SEQ ID NO: 1049 - DNA, 364 bp, synthetic construct
  misc_feature 1..364: note = Synthetic
  source 1..364: mol_type = other DNA
caggtgcagctacagcagtggggcgcaggactgttgaagccttcggagaccctgtccctcacctgcgctgtctatggtgggtccttcactggttactactggagttggatccgtcagccccccgggaaggggctggagtggattggtgaagtcattcatagtggaacctcttactacaacccgtccctcaagagtcgcgtcaccatttcactagacacgtccaagaaccagttctccctgaacctgacctctgtaaccgccgcggacacggctgtatattactgtgcgagaggccaccctctggtggtcgtggttaaggggttcgacccctggggccagggaaccctggtcaccgtctcctcag

SEQ ID NO: 1050 - DNA, 322 bp, synthetic construct
  misc_feature 1..322: note = Synthetic
  source 1..322: mol_type = other DNA
gacatccagatgacccagtctccatcctccctgtctgcatctgtaggagacagagtcaccatcacttgccgggcaagtcagggcattagaaatgagttaggctggtatcagcagaaaccagggaaagcccctaagcccctgatctatgctgcatccagtttgcaaagtggggtcccatcaaggttcagcggcagtggatctgggacagaattcactcttacaatcagtagcctgcagcctgaagattttgcaacttattactgtctacaacattatacttaccctcggacttttggccaggggaccaagctggagatcaaac

SEQ ID NO: 1051 - DNA, 373 bp, synthetic construct
  misc_feature 1..373: note = Synthetic
  source 1..373: mol_type = other DNA
caggtccagctggtacagtctggggatgacgtgaagaagcctggggcctcagtgaaagtctcctgcaaggtttccggatacaccctcagtgaattatccatgcactgggtgcgacaggctcctggcaaagggcttgagtggatgggaggctttgatcctgaaaatgctaaaacaatctacgcacagaagttccaggacagagtcaccatgaccgaggacacatttacagacacagcctacatggagctgagcggcctgagatctgatgacacgggcctgtatttctgtgcagcagcgtttgcagtaattggttctcccaataactattactattactacggtatcgacgtctggggccaagggaccacggtca

SEQ ID NO: 1052 - DNA, 331 bp, synthetic construct
  misc_feature 1..331: note = Synthetic
  source 1..331: mol_type = other DNA
cagtctgtgctgactcagccaccctcagcgtctgggagtcccggacagagggtcaccatctcttgttctggaagcaactccaacatcggaaatacttttatctactggtaccagcaactcccagggacggcccccaaactcctcatctttaggaatgatcagcggccctcaggggtccctgaccgattctctggctccaagtctggcacctcagcctccctggccatcagtggactccggtccgaggatgaggctgcttattactgtgcagcttggattgacagcctgagtgcttgggtcttcggcggggggaccatgctgaccgtcgtag

SEQ ID NO: 1053 - DNA, 384 bp, synthetic construct
  misc_feature 1..384: note = Synthetic
  source 1..384: mol_type = other DNA
caggtccagctggtacagtctggggctgaggtgaagaagcctggggcctcagtgaaggtcccctgcagggtttccggatacaccctcagtgaattatccatacactgggtgcgacaggctcctggaaaagggcttgagtggatgggaggttttgatcctgaagatggtacaacagtctacgcacagaagttccagggcagagtctccatgaccgaggacacatctacagacacagcctacatggagttgagcagcctgagatctgaggacacggccgtgtattattgtgcaaccggatacgcagtgactggtacgccccagaattatcaatattactacggactggacttctggggccaagggaccacggtcaccgtctcctca

SEQ ID NO: 1054 - DNA, 322 bp, synthetic construct
  misc_feature 1..322: note = Synthetic
  source 1..322: mol_type = other DNA
gaaattgtgttgacgcagtctccaggcaccctgtctttgtctccaggggaaagagccaccctctcctgcagggccagtcagagtgttaggaacaactacttagcctggtaccagcagaaacctggccaggctcccaggctcctcatctatggtgtttccagcagggccactgacatcccagacaggttcagtggcagtgggtctgggacagacttcactctcaccatcagcagactggagcctgaagattttgcagtttattactgtcagaagtatggtagctcacattcctttggccaggggaccaagctggagatcaaac

SEQ ID NO: 1055 - DNA, 379 bp, synthetic construct
  misc_feature 1..379: note = Synthetic
  source 1..379: mol_type = other DNA
caggtgcagctggtggagtctgggggaggcgtggtccagcctggggggtcactgagactctcctgtgttgcctctggattcaccttcagtaactatgctatgcattgggtccgccaggctcctggcaaggggctggagtggttggcagttacgtcatctggtggaggcgatacatactacgcagactccggtgagggccgattcatcgtctccagagacaacttcaggaacacactgttcctgcacctgaacagcctgagacctgaggacacggctgtctattactgtgcgagagatctctttgatactagcggttatctccagatcgtgggtgtttttgatgtctgtggccaagggacaatggtcaccgtctcttcag

SEQ ID NO: 1056 - DNA, 322 bp, synthetic construct
  misc_feature 1..322: note = Synthetic
  source 1..322: mol_type = other DNA
gacatccagatgacccagtctccttccaccctgtctgcctctgtcggagacagagtcaccatcacttgccgggccagtcagagtattagtaactggttggcctggtatcagcagaaaccagggaaagcccctaaggtcctaatccataaggcgtctactttagaaagtggggtcccatcaaggttcagcggcagtgaatttgggacagacttcactctcaccatcagcagcctgcaggctgatgattttgcaacttattactgccaacagtattatagttatcccttgacgttcggccaagggaccaaggtggaaatcaaac

SEQ ID NO: 1057 - DNA, 381 bp, synthetic construct
  misc_feature 1..381: note = Synthetic
  source 1..381: mol_type = other DNA
gaggtgcagctggtggagtctgggggaggcctggtcaagcctggggggtccctgagactctcctgtgtggcctctggattcacgttcagtagttatagtatgaactgggtccgccaggttccagggaaggggctggagtggctcttatccattagcagtagtagtagttacagatattatggagactcagtgaagggccgattcaccatttccagagacaacgccaacaatacactgtatctgcaaatgagccgcctgagagccgaggacacggctgtgtacttctgtgcgagagatcttgtggagggtggggatttaggaagagttggttcctactacatggacgtctggggcaaagggaccacggtcaccgtctcctca

SEQ ID NO: 1058 - DNA, 322 bp, synthetic construct
  misc_feature 1..322: note = Synthetic
  source 1..322: mol_type = other DNA
gacatccagatgacccagtctccatcctccctgtctgcatctgttggagacacagtcaccatcacttgccgggcaagtcagggcattagaaatgatttaggctggtatcagcacaaaccagggagagcccctaaactcctgatctctgctgcatccactttacaaagtggggtcccgtcaaggttcaccggcagtggatctggcacagttttcactctcaccatcagcagcctgcagcctgaagattttgcaacttattactgtctacaagattacctttatcctaggacttttggccaggggaccaagctggagatcaaac

SEQ ID NO: 1059 - DNA, 382 bp, synthetic construct
  misc_feature 1..382: note = Synthetic
  source 1..382: mol_type = other DNA
gaggtgcagctgttggagtctgggggagacttggtacagccgggggggtccgtgagaatctcctgtgcagcctcaggattcagttttagcagccatgccatgagctgggtccgccaggctccagggaaggggctggagtgggtctcaagttttagtggtactactataagtatatactatgcagatgccgcgaagggccggttcaccatctccagagacaattccaagaacacgctctatctacaaatgaacagcctgagagtcgaggacacggccatttattactgtgcgagaggggtcaggctggttccgggtgacttttgggacaactactggtacttcgacctctggggccgtggcaccctggtcaccgtctcctcag

SEQ ID NO: 1060 - DNA, 331 bp, synthetic construct
  misc_feature 1..331: note = Synthetic
  source 1..331: mol_type = other DNA
cagtctgccctgactcagcctccctccgcgtccgggtctcctggactgtcagtcaccatcgcctgcactggaaccagcagtgacgttggtggttataaatatgtctcctggtaccaacaacacccaggcaaagcccccaaacttctgatttatgaggtcactaagcggccctcaggggtccctgatcgcttctctggctccaagtctggcatcacggcctccctgaccgtctctgggctccaggctgaggatgaggctgattatttctgcagctcatatgcaggcagcaacaatttggttttcggcggagggaccaagctgaccgtcctag

SEQ ID NO: 1061 - DNA, 356 bp, synthetic construct
  misc_feature 1..356: note = Synthetic
  source 1..356: mol_type = other DNA
gaggtgcagctgttggagtctgggggaggcttcgttcagcggggggggtccctaagactctcctgtgtggcctctggattcagccttagcagcgatgccatgagctgggtccgccaggctccagggaaggggccggagtgggtcgcagctattagtcctagtgccactgccacatactacacagactccgtggagggccgtttcaccatctccagagacaattccaagaatactctatttctacaaatgaacagcctgcgagccgaagacacggccatttattactgtgcgaaagatccgttggggctcctcttttttgacttctggggccagggaaccctggtcaccgtctcctc

SEQ ID NO: 1062 - DNA, 318 bp, synthetic construct
  misc_feature 1..318: note = Synthetic
  source 1..318: mol_type = other DNA
gacatccagatgacccagtctccttccaccctgtccgcatctgttggagacagagtcaccatcacttgccgggccagtcagagtattagtagctggttggcctggtatcagcagaaaccagggaaagcccctaaactcctgatctatgaggcgtccagtttagaaagtggggtcccgtcaaggttcagcggcagtggatctgggacagaattcactctcaccatcagcagcctgcagcctgatgattttgcaacttattactgccaacagtataatacttattcgacattcggccaggggaccaaggtggaaatcaaa

SEQ ID NO: 1063 - DNA, 376 bp, synthetic construct
  misc_feature 1..376: note = Synthetic
  source 1..376: mol_type = other DNA
gaggtgcagctggtgcagtccggagcagaggtgaaaaagcccggggagtctctgaggatctcctgtaaggcctctggatacagctttacccacttctggatcagttgggtgcgccagacgcccgcgaaaggcctggagtggatggggaggattgatcctagtgactcttctaccacctacagcccatccttccaaggccacgtcaccatctcaattgacaagtccctcaacactgccttcctacaatggagcagcctgaaggcctgggacaccgccatgtatttctgtgcgagagagccgcgtattacggttcttggtgtcttggaccattggttcgacccctggggccagggaaccctggtcaccgtctcctcag

SEQ ID NO: 1064 - DNA, 331 bp, synthetic construct
  misc_feature 1..331: note = Synthetic
  source 1..331: mol_type = other DNA
cagtctgtgctgactcagccaccctcagtgtctgggacccccgggcagagggtcaccatctcttgttctggaggcagctccaacatcgggcgtaattatgtttactggtatcagcaactcccaggaacggcccccaaactcctcatctatagtaatattcagcggccctcaggggtccctgaccgattctctggctcgaagtctggcacctcagcctccctggccaacagtgggctccggtccgaggatgaggctgattattactgtgcagcatgggatgacagcctgagtgcttgggtgttcggcggagggaccaagctgaccgtcctag

SEQ ID NO: 1065 - DNA, 376 bp, synthetic construct
  misc_feature 1..376: note = Synthetic
  source 1..376: mol_type = other DNA
gaggtgcagctgttggagtctgggggaggcttggttcagcctggggggtccctgagactctcctgtgcagcctcgggattcacctttaagaactatgccatgacctgggtccgccaggctccagggaaggggctggagtgggtctcggctattagtgacaatggtggtaatatatactacgcagactccgtgaagggccgcttcaccgtctccagagacaattccaagaacacactgtatctgcaaatgaacaggctgagagccgacgacacggccgtctattactgtgcgaaagatgggggtacggtccaggtttttttatgggcgtactactttgactactggggccagggagccctggtcaccgtctcctcag

SEQ ID NO: 1066 - DNA, 337 bp, synthetic construct
  misc_feature 1..337: note = Synthetic
  source 1..337: mol_type = other DNA
cagtctgccctgactcagcctgcctccgtgtctgggtctcctggacagtcggtcaccatctcctgcactggaaacagcaatgatgttgggagttataatcttgtctcgtggtaccaacagcacccaggcaaagcccccaaagtcattatttttgacgtcaataagcggccctcaggggtttctgctcgcttttctggctccaagtctggcaacacggcctccctgacaatctctgggctccaggctgaggacgaggctgattattactgctgttcatactcaggtgctaccactctccatgtgcttttcggcggagggaccaaactgaccgtcctag

SEQ ID NO: 1067 - DNA, 388 bp, synthetic construct
  misc_feature 1..388: note = Synthetic
  source 1..388: mol_type = other DNA
caggtgcagctgcaggagtcgggcccaggactggtgaagccttcacagaccctgtccctcacctgcactgtctctggtggctccatcagcagtggtagttactactggagctggatccggcagcccgccgggaagggactggagtggattgggcgtatctataccagtgggagcaccaactacaacccctccctcaagagtcgagtcaccatatcagtagacacgtccaagaaccagttctccctgaagctgagctctgtgaccgccgcagacacggccgtgtattactgtgcgagagaaccgcaccgtctctattactatgataatagtgattatgcaaatgcttttgatatctggggccaagggacaatggtcaccgtctcttcag

SEQ ID NO: 1068 - DNA, 331 bp, synthetic construct
  misc_feature 1..331: note = Synthetic
  source 1..331: mol_type = other DNA
cagtctgccctgactcagcctgcctccgtgtctgggtctcctggacagtcgatcaccatctcctgcactggaaccagcagtgatgttgggagttataaccttgtctcctggtaccaacagcacccaggcaaagcccccaaactcttgatttatgaggtcagtaagcggccctcaggggtttctaatcgcttctctggctccaagtctggcaacacggcctccctgacaatctctgggctccaggctgaggacgaggctgattattactgctgctcatatgcaggtagtagaatttgggtgttcggcggagggaccaagctgaccgtcctag

SEQ ID NO: 1069 - DNA, 373 bp, synthetic construct
  misc_feature 1..373: note = Synthetic
  source 1..373: mol_type = other DNA
caggtgcagctggtgcagtctggggctgaggtgaagaagccggggtcctcggtgaacgtctcctgcaaggcttccggaggcaccttcagtagatatggtttcagctgggtgcgacaggcccctggacaaggccttgagtggatgggaaggatcattcctatccttggaacagcagactacgcacagaagttcctgggcagagtaacacttaccgcggacaaatccgcgagcacatcgaacatggagctgactagcctgaactctgaggacacggccgtatattactgtgcgacaatgaattcgggaacactcgtgaacggggagttaacgccggactactggggccaggggaccctggtcaccgtctcctcag

SEQ ID NO: 1070 - DNA, 322 bp, synthetic construct
  misc_feature 1..322: note = Synthetic
  source 1..322: mol_type = other DNA
gacatccagatgacccagtctccatcctccctgtctgcatctgtaggagacagagtcaccatcacttgccgggcaagtcagcggattagcggctttttaaattggtatcaacagaaaccaggaaaagcccctgagctcctgatctctgccgcatccaggttgcaaagtggggtcccatcaaggttcagtggcagtgggtctgggacagatttcactctcaccatcagcagtctgcaacctgaagattttgcaacttactactgtcaacagagttacattaccccgatcaccttcggccaggggacacgactggagattaaac

SEQ ID NO: 1071 - DNA, 372 bp, synthetic construct
  misc_feature 1..372: note = Synthetic
  source 1..372: mol_type = other DNA
caggtgcagctggtgcagtctggggctgaggtgaagaagcctggggcctcagtgaaggtctcctgcagggcttctggaaacaccttcagcagttatgatatcaactgggtgcgacaggccactggacaagggcttgagtggatgggatggatgaaccctaatagtgggaagacaggatatgcacagaagttccagggcagagtcaccatgaccaggaatacctccatgacaacggcctacatggagctgagcagcctgagatcggaggacacggccgtgtattattgtgcgagggggttacgggttcacgagtggttagcaactcgtggtatggacgtctggggccaagggaccacggtcaccgtctcctca

SEQ ID NO: 1072 - DNA, 322 bp, synthetic construct
  misc_feature 1..322: note = Synthetic
  source 1..322: mol_type = other DNA
gacatccagatgacccagtctccatcctccctgtctgcatctgtaggagacagagtcaccatcgcttgccgggcgagtcaggacattagcaattctttagcctggtatcagcagaggccagggaaagccccaaagttcctgctctatgctgcatccagattggaaagtggggtcccatccaggttcagtggcagtggctccgggacggattacactctcaccatcagcagcctgcagcctgaagattttgcaacttattactgtcaacagtattatgataagcctctcactttcggcggagggaccaaggtggaaatcaaac

SEQ ID NO: 1073 - DNA, 369 bp, synthetic construct
  misc_feature 1..369: note = Synthetic
  source 1..369: mol_type = other DNA
caggtgcagctgcaggagtcgggcccaggactggtgaagccctcggagaccctgtccctcacctgcagtgtctctgctggctccatcagtatttaccactggagctggatccggcagcccccagggaagggactggagtggattgggtatatctattacagtgggagcaccaactacaacccctccctcaagagtcgagtcaccatatcaatagacacgtccaagaaccagttctccctgaagctgagctctgtgaccgctgcggacacggccgtttattactgtgcgggaggtatagacgcgacgccggtggggtactattatggtatggacgtctggggccaagggaccacggtcaccgtctcctca

SEQ ID NO: 1074 - DNA, 322 bp, synthetic construct
  misc_feature 1..322: note = Synthetic
  source 1..322: mol_type = other DNA
tcctatgagctgacacagccaccctcagtgtccgtgtccccaggacagacagccagcatcacctgctctggagataaattgggggatcaatatgctttctggtatcagcagaagccaggccagtcccctgtgctggtcatctatcaagataccaagcggccctcagggatccctgagcgattctctggctccaactctgggaacacagccactctgaccatcagcgggacccaggctatggatgaggctgactattactgtcaggcgtgggacagcagcacttacgtggttttcggcggagggaccaagctgaccgtcctag

SEQ ID NO: 1075 - DNA, 373 bp, synthetic construct
  misc_feature 1..373: note = Synthetic
  source 1..373: mol_type = other DNA
gaggtgcagctgttggagtctgggggaggcttaatacagcctggggggtccctgagactctcctgtgcagcctctggattcacctttagcagctatgccatgatgtgggtccgccaggctccagggaaggggctggactgggtctcagctattagtactagtggcagtgccacacactacgcagactccgtgaagggccggttcaccatctccagagacaattccaagaacacactgtatctgcaaatgaacagcctgagattcgaggacacggccgtatattactgcgcgaaagaccctcacccttatagcagcagctggtacggctggctcgacccctggggccagggaaccctggtcaccgtctcctcag

SEQ ID NO: 1076 - DNA, 322 bp, synthetic construct
  misc_feature 1..322: note = Synthetic
  source 1..322: mol_type = other DNA
gacatccagatgacccagtctccatcctccctgtctgcatctgtaggagacagagtcaccatcacttgccgggcaagtcagggcattagagatgatttaggctggtatcagcagaaaccagggaaagcccctaagcgcctgatctttgctgcatccagtttgcaaagtggggtcccatccaggttcagcggcagtggatctgggacagaattcactctcacaatcagcagcctgcagcctgaagattttgcaacttattactgtctacagcataatacttaccctctcactttcggcggagggaccaaggtggagatcaaac

SEQ ID NO: 1077 - DNA, 372 bp, synthetic construct
  misc_feature 1..372: note = Synthetic
  source 1..372: mol_type = other DNA
gaagtgcagctggtggagtctgggggaggcttggtacagcctggcaggtccctgagactctcctgtgtagcgtccggattcatctttgaagattatgccatgcactgggtccgccaagctccagggaagggcctggagtgggtctcaggtattagttggaatagtggtacccgaggctatgcggactctgtgaagggccgattcagcgtctccagagacaatgccaagaacactctgtatctagaaatggatcgtctgagagttgaggacacggccttgtattactgtgcaaaagacggcggattgcgatatcagttgatgtccgacggtatggacgtctggggccaagggaccacggtcaccgtctcctca

SEQ ID NO: 1078 - DNA, 337 bp, synthetic construct
  misc_feature 1..337: note = Synthetic
  source 1..337: mol_type = other DNA
gatgttgtgatgactcagtctccactctccctgcccgtcacccttggacagccggcctccatctcctgcaggtctagtcatagcctcgtgtacagtgatggaaacacctacttgaattggtttcagcagaggccaggccaatctccaaggcgcctaatttataaggtttctacccgggactctggggtcccagacagattcagcggcagtgggtcaggcactgatttcacactgaaaatcagcagggtggaggctgaggatgttggggtttattactgcatgcaaagtatattctggcctcggacttttggccaggggaccaagctggagatcaaac

SEQ ID NO: 1079 - DNA, 337 bp, synthetic construct; identical to SEQ ID NO: 1078
  misc_feature 1..337: note = Synthetic
  source 1..337: mol_type = other DNA

SEQ ID NO: 1080 - DNA, 340 bp, synthetic construct
  misc_feature 1..340: note = Synthetic
  source 1..340: mol_type = other DNA
gacatcgtgatgacccagtctccagactccctggctgtgtctctgggcgagagggccaccatcaactgcaagtccagccagagtgttttattcagctccaacaataagaactacttagcttggtatcagcagaaaccaggacagcctcctaagctgctcttttactgggcatctacccggggatccggggtccctgaccgcttcagtggcagcgggtctgggacagatttcactctcaccatcagcagcctgcaggctgaagatgtggcagtttattactgtcagcaatattataactctcctcgaacgttcggccaagggaccaaggtggagatcaaac

SEQ ID NO: 1081 - DNA, 370 bp, synthetic construct
  misc_feature 1..370: note = Synthetic
  source 1..370: mol_type = other DNA
caggtgcagctgcaggagtcgggcccaggactggtgaagccttcggagaccctgtccctcacctgcattgtctctggtagctccatcagtagttactactggagttggatccggcagcccccagggaagggactggagtggattggatatatctattacactgggagcaccaactacaacccctccctcaagagtcgagtcaccatatcagtagacacgtccaagaatcagttctccctgaagctgacctctgtgaccgctgcggacacggccgtgtattattgtgcgagagaaaattttgatgttaccagttattacaacgggtggttcgacccctggggccagggaaccctggtcaccgtctcctcag

SEQ ID NO: 1082 - DNA, 340 bp, synthetic construct
  misc_feature 1..340: note = Synthetic
  source 1..340: mol_type = other DNA
gacatcgtgatgacccagtctccagactccctggctgtgtctctgggcgagagggccaccatcaactgcaagtccagccagagtgttttgtacagctccaacaataagaactacttagcttggtaccagcagaaaccaggacagcctcctaagctgctcatttactgggcgtctacccgggaatccggggtccctgaccgattcagtggcagcgggtctgggacagatttcactctcaccatcagcagcctgcaggctgacgatgtggcagtttattactgtcagcaatattataatagtcctcggacgttcggccaagggaccaaggtggaaatcaaac

SEQ ID NO: 1083 - DNA, 355 bp, synthetic construct
  misc_feature 1..355: note = Synthetic
  source 1..355: mol_type = other DNA
gaggtgcagctgttggagtctgggggaggcttggtacagcctggggggtcccggagactctcctgtgcagcctctggattcacctttagcatcgctgccatgagctgggtccgccaggctccagggaaggggctggagtgggtctcagttattagtactagtggtggcacctcatactacgcagactccgtgaggggccggttcaccatctccagagacaattcccagaacacgttgtatctgcaaatgaacagcctgagcgccgaggacacggccatatattactgtgcgaaagatctggggagctacttccctgactactggggccagggaaccctggtcaccgtctcctcag

SEQ ID NO: 1084 - DNA, 325 bp, synthetic construct
  misc_feature 1..325: note = Synthetic
  source 1..325: mol_type = other DNA
gacatccagatgacccagtctccatcctccctgtctgcatctgtaggagacagagtcaccatcacttgccgggcaagtcagggcattagaaatgatataggctggtatcagcagaaaccaggtaaagcccctaagcgcctgatccatgctgcatccagtttgcaaagtggggtcccatcaaggttcagcggcagtggatctgggacagaattcactctcacaatcagcagcctacagcctgaagattttgcaacttattactgtctccaatataatagttaccctcgagtcactttcggccctgggaccaaagtggatatcaaac

SEQ ID NO: 1085 - DNA, 373 bp, synthetic construct
  misc_feature 1..373: note = Synthetic
  source 1..373: mol_type = other DNA
gaggtgcagctgttggagtctgggggaggcttggtacagccgggggggtccctgagactctcctgtgcagccgctggattcacctttaccacctctggcatgacctgggtccgacaggctccagggaaggggctggagtgggtctcaagtattagtgttagtggtggtagcacatactacgcagcctccgtgaagggccggttcaccgtcgccagagacaatgccaagaacacgttgtatctggaaatgaacagtctgagagccgaggacacggccgtatattactgtgcgaaagatagggggtggggtgtagaagaggctgggacatatcttgaccactggggccagggaaccctggtcaccgtctcctcag

SEQ ID NO: 1086 - DNA, 331 bp, synthetic construct
  misc_feature 1..331: note = Synthetic
  source 1..331: mol_type = other DNA
cagtctgccctgactcagcctgcctccgtgtctgggtctcctggacagtcgatcaccatctcctgcactggaaccagcagtgacattggtgcttataactatgtctcctggtatcaacatcacccaggcaaagcccccaaagtcctgatttatgaggtcagtaatcggccctcaggggtttctattcggttctctgggtccaagtctggcaacacggcctccctgaccatctctgggctccaggctgaggacgaggctaattattactgcagctcatatagaagcgacagcactgtgactttcggcggagggaccaagctgaccgtcctag

SEQ ID NO: 1087 - DNA, 372 bp, synthetic construct
  misc_feature 1..372: note = Synthetic
  source 1..372: mol_type = other DNA
gaggtgcagctgttggagtctgggggaggtttggtacagccgggggggtccctgagactctcctgtgcagcctctggattcacctttagtaattatgtcatgaattgggtccgccaggctccagggaaggggctggagtgggtctcaactctcagtggcagtggtggcagcatatactatgcagactccgtgaagggccggttcaccatctccagagacaattccaagaatacactgtatctacaaatgaacagcctgagagccgaggacacggccgtctattactgtgcgaaagacccgagtgggagccatatttactaccactattacatggacgtctggggcaaagggaccacggtcaccgtctcctca

SEQ ID NO: 1088 - DNA, 335 bp, synthetic construct
  misc_feature 1..335: note = Synthetic
  source 1..335: mol_type = other DNA
cagtctgccctgactcagcctgcctccgtgtctgggtctcgtggacagtcgatcaccatctcctgcactggaaccagcagtgatgttgggagttataaccttgtctcctggtaccaacaacacccaggcaaagtccccaaagtcatgatttatgaggtcaataagcggccctcaggggttcctaatcgcttctctggctccaagtctggcaacacggcctccctgacaatctctgggctccaggctgaggacgaggctgattattactgctgctcatatgcaggtagtagtaacagttacgtcatcttcggcggagggaccaaactgaccgtcct

SEQ ID NO: 1089 - DNA, 372 bp, synthetic construct
  misc_feature 1..372: note = Synthetic
  source 1..372: mol_type = other DNA
gaggtgcagctgttggagtctgggggaggcttagtacagccgggggggtccctgagactctcctgtgcagcctctggattcagttttagtagttatgtcatggtttgggtccgccaggctccagggaaggggctggagtgggtctcactcattagtgggagtggtctcatcacatactacgcagactccgtgaagggccggttcaccatctccagagacaattccaagaagacactgtttctgcaaatgaacagcctgagagtcgaggacacggccgtctattactgtgcgaaagatggttctatggctacccattattaccactactacatggacgtctggggcaaagggaccacggtcaccgtctcctca

SEQ ID NO: 1090 - DNA, 337 bp, synthetic construct
  misc_feature 1..337: note = Synthetic
  source 1..337: mol_type = other DNA
cagtctgccctgactcagcctgcctccgtgtctgggtctcctggacagtcgatcaccatctcctgcactggaaccagcagtgatgttgggagttttaaccttgtctcctggtaccaacaacacccaggcaaagcccccaaactcatcatttatgagggcaataagcggccctcagggatctctagtcgcttctctggctccaagtctggcaacacggcctccctgacaatctctgggctccaggctgaggacgaggctgattattactgctcctcatatgcaggtattaccactttctatgtggtcttcggcggagggaccaagctgaccgtcctag

SEQ ID NO: 1091 - DNA, 372 bp, synthetic construct
  misc_feature 1..372: note = Synthetic
  source 1..372: mol_type = other DNA
gaggtgcagctgttggagtcggggggaggcttggtacagcctggggggtccctgagactctcctgtgcagcctctggattcgcctttcgcaactatgtcatgatctgggtccgccaggctccagggaaggggctggagtgggtctcagcaataggtggtagtggtgggagtatatattatggagactccgtgaagggccggttcaccacttccagagacaattccaagaacacgctgtatctgcagatgaacaacctgagagccgaggacgcggccacatatttctgtgcgaaagatgggggggtggagagtcactactactactactacatggacgtctggggcaaagggaccacggtcaccgtctcctca

SEQ ID NO: 1092 - DNA, 337 bp, synthetic construct
  misc_feature 1..337: note = Synthetic
  source 1..337: mol_type = other DNA
cagtctgccctgactcagcctgcctccgtgtctgggtctcctggacagtcgatcaccatctcctgcactggaaccagcagtgatgttgggagttataaccttgtctcctggtaccaacaacacccaggcaaagcccccaagctcatgatttatgacgtcagtaagcggccctcaggggtttctaatcgcttctctggctccaagtctggcaatagggcctccctgacaatctctggactccaggctgaggacgaggctgattattactgctgctcatatgcaggaactacaacttccttttatgtcttcggaactgggacccaggtcaccgtcctag

SEQ ID NO: 1093 - DNA, 352 bp, synthetic construct
  misc_feature 1..352: note = Synthetic
  source 1..352: mol_type = other DNA
caggtgcagctggtggagtctgggggaggcgtggtccagtcgggggggtcactgagactctcctgtgcagcgtccggattcagcttcagtaactatggcatgcactgggtccgccaggctccaggcaaggggctgcagtgggtggcctttatacgatatgatggaactagtaaatactatgcagactccgtgaggggccgattcagcgtttccagagacaattccaagaatacgctgtatctgcagatgaacagcctgagacccgaggacacggctgtctattactgtgcgacattcatcttcattgcctttgactattggggccagggaaccctggtcaccgtctcctcag

SEQ ID NO: 1094 - DNA, 331 bp, synthetic construct
  misc_feature 1..331: note = Synthetic
  source 1..331: mol_type = other DNA
cagtctgccctgactcagcctcactcagtgtccgggtctcctggacagtcagtcaccatctcctgcactggaaccagcagtgatgttggtacttatcacgctgtctcctggtaccaacaacaccccggcaaggcccccaaactcatgatttttgatgtcactaaacggccctcaggggtccctgatcgcttctctggctccaggtctggcaacacggcctccctgaccatctctgggctccaggctgaggatgaggctgagtattactgctgctcatatgcaagcagttattcatatatcttcggacctgggaccaaggtcaccgtcctag

SEQ ID NO: 1095 - DNA, 370 bp, synthetic construct
  misc_feature 1..370: note = Synthetic
  source 1..370: mol_type = other DNA
gaggtgcagctggtggagtccgggggaggcttagttcagcctggggggtccctgagactgtcctgtgcagcctctggattcaccttcagcagctactggatgcactgggtccgccaagctccagggaaggggctggtgtgggtctcacatattagtagtgatgaatatattataaactactcggcctccgtgaagggccgattcaccatctccagagacaacgccaagaacaccctgtatctgcaaatgaacagtctgagagccgaggacacggctgtctattactgtgcaagatctaacgggggtttggagtgggtatccgatgcttttgatatctggggccaggggacaatggtcaccgtctcttcag

SEQ ID NO: 1096 - DNA, 322 bp, synthetic construct
  misc_feature 1..322: note = Synthetic
  source 1..322: mol_type = other DNA
tcctatgagctgactcagccaccctcggtatcagtgtccccaggacagacggccaggatcacctgctctggagatgcactggcaaaccaatatgtctattggtaccagcagaagccaggccaggcccctgtgttggtgatatataaagacaatgagaggccctcagggatccctgagcgatactctggctccagctcagggacaacagtcaccttgaccatcagtggggtccaggcagaagacgaggctgactattattgtcaatcagcagactccaattctaattgggtgttcggcggagggaccaagttgaccgtcctag

SEQ ID NO: 1097 - DNA, 379 bp, synthetic construct
  misc_feature 1..379: note = Synthetic
  source 1..379: mol_type = other DNA
gaggtgcagctgttggagtctgggggaggcttggtacagccgggggggtccctgagactctcctgtgcagcctctggattcacctttaccagctctggcatgagctgggtccgccaggctccagggaaggggctggagtgggtctcaagtattagtgttagcggtgcaagcacatactacgcagactccgtgaagggccggttcaccatctccagagacaattccaagaacacgctgcatctgcaaatgaacagcctgagagccgaggacacggccgtatatttctgtgcgaaacaggggtcttctggtattactatggaagaagtggttattccctttgactactggggccagggaaccctggtcaccgtctcctcag

SEQ ID NO: 1098 - DNA, 322 bp, synthetic construct
  misc_feature 1..322: note = Synthetic
  source 1..322: mol_type = other DNA
gacatccagatgacccagtctccatcctccctgtctgcatctgtaggagacagagtcaccatcacttgccgggcaagtcagagcattagcaggtatttaaattggtatcagcagagaccagggaaagcccctaagctcctgatctatgctgcatccagtttgcaaagtggggtcccatcaaggttcagtggcagcggatctgggacagatttcactctcaccatccgcagtctgcaacctgaagattttgcgacttactactgtcaccagagttacagtaccctctggacgttcggccaggggaccaaggtggaaatcaaac

SEQ ID NO: 1099 - DNA, 373 bp, synthetic construct
  misc_feature 1..373: note = Synthetic
  source 1..373: mol_type = other DNA
gaggtgcagctggtggagtctgggggaggtttggtccagcctggggggtccctaagactctcctgtacagcctctggattcacctttaatgaccattggatgaactgggtccgccaggctccagggaaggggctggagtgggtggccagcataaagcatgatggaaatgagaaatactatgtggactctgtgaagggccgattcaccatctccagagacaacgccaagaactcagtgtatctgcaaatgaacagcctgagagccgacgacacggctatatattactgtgcgagaggggcccgatttttggagtggttaccccagtccccttttgactactggggccagggaaccctggtcaccgtctcctcag

SEQ ID NO: 1100 - DNA, 322 bp, synthetic construct
  misc_feature 1..322: note = Synthetic
  source 1..322: mol_type = other DNA
gacatccagatgacccagtccccatcctccctgtctgcatctgtaggagacagagtcaccatcacttgccgggcgagtcaggacattagtaattctttagcctggtatcaacagaaaccagggaaagcccctaagttcctgctctatgctgcatccaggttgggaagtggcatcccatccaggttcagtggcagtggctctgggacggattacactctcaccatcagcagcctgcagcctgaagattttgcaatttattactgtcaacagtattatgatacccctctcactttcggcggagggaccaaggtggagatcaaac

SEQ ID NO: 1101 - protein, 123 aa, synthetic construct
  REGION 1..123: note = Synthetic
QVQLVQSGAEVKKPGASVKVSCKVSGYTLIELSMHWVRQAPGKGLEWMGGFDPEDGETIYAQKFQGRVTMTEDTSTDTAYMELSSLRSEDTAVYYCATTSAIPIPGTGWFDPWGQGTLVTVFS

SEQ ID NO: 1102 - protein, 16 aa, synthetic construct
  REGION 1..16: note = Synthetic
ATTSAIPIPGTGWFDP

SEQ ID NO: 1103 - protein, 110 aa, synthetic construct
  REGION 1..110: note = Synthetic
QFVLTQPASVSGSPGQSITISCTGTSSDVGSYNLVSWYQQHPGKAPKLMIYDVSKRPSGVSNRFSGSKSGNTASLTISGLQAEDEADYYCCSYAGSSTLVFGGGTKLTVL

SEQ ID NO: 1104 - protein, 10 aa, synthetic construct
  REGION 1..10: note = Synthetic
CSYAGSSTLV

SEQ ID NO: 1105 - protein, 125 aa, synthetic construct
  REGION 1..125: note = Synthetic
QVQLVQSGAEVKKPGASVKVSCKVSGYTLIELSMHWVRQAPGKGLEWMGGFDPEDGETIYAQKFQGRVTMTEDTSTDTAYMELSSLRSEDTAVYYCAVTAPYCTSTSCRNWFDPWGQGTLVTVSS

SEQ ID NO: 1106 - protein, 18 aa, synthetic construct
  REGION 1..18: note = Synthetic
AVTAPYCTSTSCRNWFDP

SEQ ID NO: 1107 - protein, 110 aa, synthetic construct
  REGION 1..110: note = Synthetic
QSVLTQPPSVSAAPGQKVTISCSGSSSNIGNNYVSWYQQLPGTAPKLLIYENNKRPSGIPDRFSGSKSGTSATLGITGLQTGDEADYYCGTWDSSLSAGVFGGGTKVTVL

SEQ ID NO: 1108 - protein, 11 aa, synthetic construct
  REGION 1..11: note = Synthetic
GTWDSSLSAGV

SEQ ID NO: 1109 - protein, 121 aa, synthetic construct; identical to SEQ ID NO: 183
  REGION 1..121: note = Synthetic

SEQ ID NO: 1110 - protein, 14 aa, synthetic construct
  REGION 1..14: note = Synthetic
AMSPAIISSYWFDP

SEQ ID NO: 1111 - protein, 112 aa, synthetic construct
  REGION 1..112: note = Synthetic
QFVLTQPASVSGSPGQSITISCTGTSSDVGGYNSVSWYQQHPGKAPKLMIYDVTNRPSGVSNRFSGSKSGNTASLTISGLQAEDEADYYCSSYTNSSTPDYVFGTGTKVTVL

SEQ ID NO: 1112 - protein, 12 aa, synthetic construct
  REGION 1..12: note = Synthetic
SSYTNSSTPDYV

SEQ ID NO: 1113 - protein, 123 aa, synthetic construct
  REGION 1..123: note = Synthetic
EVQLLESGGDLVQPGGSLRLSCAASGFTFSSYAMSWVRQAPGKGLEWVSAISGSGGSTYYADSVKGRFTISRDNSKNTLYLQMNSLRAEDTAVYYCAKDHDGTYYWLYYFDSWGQGTLVTVSS

SEQ ID NO: 1114 - protein, 16 aa, synthetic construct
  REGION 1..16: note = Synthetic
AKDHDGTYYWLYYFDS

SEQ ID NO: 1115 - protein, 111 aa, synthetic construct
  REGION 1..111: note = Synthetic
QFVLTQPASVSGSPGQSITISCTGTSSDVGSYNLVSWYQQLPGKAPKLMIYEGSKRPSGVSNRFSGSKSGNTASLTISGLQAEDEADYYCCSYAGSSTPYVFGTGTKVTVL

SEQ ID NO: 1116 - protein, 11 aa, synthetic construct
  REGION 1..11: note = Synthetic
CSYAGSSTPYV

SEQ ID NO: 1117 - protein, 121 aa, synthetic construct; identical to SEQ ID NO: 177
  REGION 1..121: note = Synthetic

SEQ ID NO: 1118 - protein, 14 aa, synthetic construct
  REGION 1..14: note = Synthetic
ARGEGSAGYSFPGY

SEQ ID NO: 1119 - protein, 110 aa, synthetic construct
  REGION 1..110: note = Synthetic
QFVLTQPPSASGTPGQRVTISCSGSSSNIGSNYVYWYQQLPGTAPKLLIYRNNQRPSGVPDRCSGSKSGTSASLAISGLRSEDEADYYCATWDDSLSGVVFGGGTKLTVL

SEQ ID NO: 1120 - protein, 11 aa, synthetic construct
  REGION 1..11: note = Synthetic
ATWDDSLSGVV

SEQ ID NO: 1121 - protein, 117 aa, synthetic construct
  REGION 1..117: note = Synthetic
EVQLVESGGDLIQPGGSLRLSCAASGFTVSSNYMNWVRQAPGKGLEWVSIIYSGGSTFYADSVKGRFTISRDNSKNTLYLQMNSLRVEDTATYFCARSYGDYYFDSWGQGTLVTVSP

SEQ ID NO: 1122 - protein, 11 aa, synthetic construct
  REGION 1..11: note = Synthetic
ARSYGDYYFDS

SEQ ID NO: 1123 - protein, 107 aa, synthetic construct
  REGION 1..107: note = Synthetic
SYVLTQPPSVSVSPGQTARITCSADALPKQYAYWYQQKPGQAPVLVIYKDSERPSGIPERFSGSSSGTTVTLTISGVQAEDEADYYCQSADSSATYVFGTGTKVTVL

SEQ ID NO: 1124 - protein, 10 aa, synthetic construct
  REGION 1..10: note = Synthetic
QSADSSATYV

SEQ ID NO: 1125 - protein, 120 aa, synthetic construct; identical to SEQ ID NO: 191
  REGION 1..120: note = Synthetic

SEQ ID NO: 1126 - protein, 13 aa, synthetic construct
  REGION 1..13: note = Synthetic
ARNYYDSSDAFDI

SEQ ID NO: 1127 - protein, 107 aa, synthetic construct
  REGION 1..107: note = Synthetic
SYVLTQPPSVSVSPGQTARITCSADALPKQYAYWYQQKPGQAPVLVIYKDTERPSGIPERFSGSTSGTTVTLTISGVQAEDEADYYCQSADSSGTYVFGTGTKVTVL

SEQ ID NO: 1128 - protein, 10 aa, synthetic construct
  REGION 1..10: note = Synthetic
QSADSSGTYV

SEQ ID NO: 1129 - protein, 123 aa, synthetic construct; identical to SEQ ID NO: 173
  REGION 1..123: note = Synthetic

SEQ ID NO: 1130 - protein, 16 aa, synthetic construct
  REGION 1..16: note = Synthetic
ATSSALMTTVTTWFDP

SEQ ID NO: 1131 - protein, 111 aa, synthetic construct
  REGION 1..111: note = Synthetic
QFVLTQPPSVSAAPGQKVTISCSGSSSNIGNNYVSWYQQLPGTAPKLLIYENNKRPSGIPDRFSGSKSGTSATLGITGLQTGDEADYYCGTWDSSLSAGAVFGGGTKLTVL

SEQ ID NO: 1132 - protein, 12 aa, synthetic construct
  REGION 1..12: note = Synthetic
GTWDSSLSAGAV

SEQ ID NO: 1133 - protein, 121 aa, synthetic construct
  REGION 1..121: note = Synthetic
QVQLQESGPGLVKPSGTLSLTCAVSGGSISSSNWWSWVRQPPGKGLEWIGEIYHSGSTNYNPSLKSRVTISVDKSKNQFSLKLSSVTAADTAVYYCARKLQFGGSSHFDYWGQGTLVTVSS

SEQ ID NO: 1134 - protein, 14 aa, synthetic construct
  REGION 1..14: note = Synthetic
ARKLQFGGSSHFDY

SEQ ID NO: 1135 - protein, 110 aa, synthetic construct
  REGION 1..110: note = Synthetic
QFVLTQPASVSGSPGQSITISCTGTSSDVGSYNLVSWYQHHPGKAPKLIIYGGSKRPSGVSNRFSGSKSGNTASLTISGLQAEDEADYYCCSYAGSSTYVFGTGTKVTVL

SEQ ID NO: 1136 - protein, 10 aa, synthetic construct
  REGION 1..10: note = Synthetic
CSYAGSSTYV

SEQ ID NO: 1137 - protein, 125 aa, synthetic construct
  REGION 1..125: note = Synthetic
QVQLVQSGAEVKKPGASVKVSCKVSGYTLPELSVHWVRQAPGKGPEWMGGFDPEDGETIYAQKFQGRVTMTEDTSTDTAYMELSSLRSEDTAVYYCAASGAYCSSTNCPRWFDPWGQGTLVTVSS

SEQ ID NO: 1138 - protein, 18 aa, synthetic construct
  REGION 1..18: note = Synthetic
AASGAYCSSTNCPRWFDP

SEQ ID NO: 1139 - protein, 109 aa, synthetic construct
  REGION 1..109: note = Synthetic
QFVLTQPPSASGSPGQSVTISCTGTSSDVGGYNYVSWYQQHPGKAPKLVIYEVSKRPSGVPDRFSGSKSGNTASLTVSGLQAEDEADYYCSSYAGSSYVFGTGTKVTVL

SEQ ID NO: 1140 - protein, 9 aa, synthetic construct
  REGION 1..9: note = Synthetic
SSYAGSSYV

SEQ ID NO: 1141 - protein, 126 aa, synthetic construct
  REGION 1..126: note = Synthetic
QVQLVQSGAEVKKPGASVKVSCKASGYTFTSYYIHWVRQAPGQGLEWMGIINPSGGSTTYAQKFQGRITMTRDTSTSTVYMEVSSLRSEDTAVYYCARDLRRRDGYNYIFPGFDYWGQGTLVTVSS

SEQ ID NO: 1142 - protein, 19 aa, synthetic construct
  REGION 1..19: note = Synthetic
ARDLRRRDGYNYIFPGFDY

SEQ ID NO: 1143 - protein, 108 aa, synthetic construct
  REGION 1..108: note = Synthetic
SYVLTQPPSVSVSPGQTARITCSGDVLSKQYAYWYQQKPGQAPVLVIYKDSERPSGIPERFSGSSSGTTVTLTISGVQAEDEADYYCQSADDSGSSVVFGGGTKLTVL

SEQ ID NO: 1144 - protein, 11 aa, synthetic construct
  REGION 1..11: note = Synthetic
QSADDSGSSVV

SEQ ID NO: 1145 - protein, 121 aa, synthetic construct
  REGION 1..121: note = Synthetic
EVQLVQSGAEVKKPGESLRISCEVSGYSFTSYWISWVRQMPGKGLEWMGRIDPSDSYTNYSPSFQGHVTISVDKSISTAYLQWSSLKASDTAMYYCARHVVAVAVFYFDYWGQGTLVTVSS

SEQ ID NO: 1146 - protein, 14 aa, synthetic construct
  REGION 1..14: note = Synthetic
ARHVVAVAVFYFDY

SEQ ID NO: 1147 - protein, 106 aa, synthetic construct
  REGION 1..106: note = Synthetic
SYVLTQPPSVSVSPGQTASITCSGDKLEDKYACWYQQKPGQSPVLVIYQDSKRPSGIPERFSGSNSGNTATLTISGTQAMDEADYYCQAWDSSTGVFGTGTKVTVL

SEQ ID NO: 1148 - protein, 9 aa, synthetic construct
  REGION 1..9: note = Synthetic
QAWDSSTGV

SEQ ID NO: 1149 - protein, 122 aa, synthetic construct
  REGION 1..122: note = Synthetic
QVQLVESGGGVVQPGRSLRLSCAASGFTFSSYGMHWVRQAPGKGLEWVAVISYDGSNKYYADSVKGRFTISRDNSKNTLYLQMNSLRAEDTAMYYCATGRHHFYNYYDMDVWGQGTTVTVSS

SEQ ID NO: 1150 - protein, 15 aa, synthetic construct
  REGION 1..15: note = Synthetic
ATGRHHFYNYYDMDV

SEQ ID NO: 1151 - protein, 110 aa, synthetic construct
  REGION 1..110: note = Synthetic
QFVLTQPPSASGTPGQRVTISCSGSSSNIGSNTVNWYQQVPGMAPKLLFYSNNQRPSGVPDRFSGSKSGTSASLAISGLQSEDEADYYCAAWDDTLNGWVFGGGTKLTVL

SEQ ID NO: 1152 - protein, 11 aa, synthetic construct
  REGION 1..11: note = Synthetic
AAWDDTLNGWV

SEQ ID NO: 1153 - protein, 120 aa, synthetic construct; identical to SEQ ID NO: 185
  REGION 1..120: note = Synthetic

SEQ ID NO: 1154 - protein, 13 aa, synthetic construct
  REGION 1..13: note = Synthetic
ARPPDYPLPYFDY

SEQ ID NO: 1155 - protein, 106 aa, synthetic construct
  REGION 1..106: note = Synthetic
SYVLTQPPSVSVSPGQTASITCSGDKLGDKFACWYQHKPGQSPVLVISQDTKRPSGIPERFSGSNSGNTATLTISGTQAMDEADYYCQAWDSNSYVFGTGTKVTVL

SEQ ID NO: 1156 - protein, 9 aa, synthetic construct
  REGION 1..9: note = Synthetic
QAWDSNSYV

SEQ ID NO: 1157 - protein, 123 aa, synthetic construct
  REGION 1..123: note = Synthetic
QVQLVQSGAEVKKPGASVTVSCKVSGFTLIELSMHWVRQAPGEGLEWLGGFDPEDGETIYAQKFQGRVTMTEDTSTDTAYMELSSLRSEDTAVYYCATSSALLTTATSWFDPWGQGTLVTVSS

SEQ ID NO: 1158 - protein, 16 aa, synthetic construct
  REGION 1..16: note = Synthetic
ATSSALLTTATSWFDP

SEQ ID NO: 1159 - protein, 111 aa, synthetic construct; identical to SEQ ID NO: 1131
  REGION 1..111: note = Synthetic

SEQ ID NO: 1160 - protein, 12 aa, synthetic construct
  REGION 1..12: note = Synthetic
GTWDSSLSAGAV

SEQ ID NO: 1161 - protein, 124 aa, synthetic construct
  REGION 1..124: note = Synthetic
EVQLLESGGGLVQPGGSLRLSCAASGFTFSNYAMSWVRQAPGKGLEWVSGISGSAGSTNYVDSVKGRFTISRDNSKNTLYLQMNSLRAEDTAVYYCARKDSYDILTGHTPLDFWGQGTLVTVSS

SEQ ID NO: 1162 - protein, 17 aa, synthetic construct
  REGION 1..17: note = Synthetic
ARKDSYDILTGHTPLDF

SEQ ID NO: 1163 - protein, 108 aa, synthetic construct
  REGION 1..108: note = Synthetic
SYVLTQPPSVSVSPGQTARITCSGDALPKQYAYWYQQKPGQAPVLVIYKDSERPSGIPERFSGSSSGTTVTLTISGVQAEDEADYYCQSADSSATYEVFGGGTKLTVL

SEQ ID NO: 1164 - protein, 11 aa, synthetic construct
  REGION 1..11: note = Synthetic
QSADSSATYEV

SEQ ID NO: 1165 - protein, 126 aa, synthetic construct; identical to SEQ ID NO: 175
  REGION 1..126: note = Synthetic

SEQ ID NO: 1166 - protein, 19 aa, synthetic construct
  REGION 1..19: note = Synthetic
ARDYVLVWFGELLTNYFDA

SEQ ID NO: 1167 - protein, 110 aa, synthetic construct
  REGION 1..110: note = Synthetic
QFVLTQPPSASGTPGQRVTISCSGSSSNIGSNNVYWYQQLPGTAPKLLIYRSNQRPSGVSARFSGSKSGTSASLAISGLRPDDEAHYHCATWDDSLSVVVFGGGTKVTVL

SEQ ID NO: 1168 - protein, 11 aa, synthetic construct
  REGION 1..11: note = Synthetic
ATWDDSLSVVV

SEQ ID NO: 1169 - protein, 117 aa, synthetic construct
  REGION 1..117: note = Synthetic
EVQLLESGGGLVQPGGSLRLSCAASGFTFSSYAMSWVRQAPGKGLEWVSAISASGGSKYYADSVKGRFTISRDNSKNTLYLQMDSLRVEDTAVYYCAKDRGGYWVYWGQGTLVTVSS

SEQ ID NO: 1170 - protein, 10 aa, synthetic construct
  REGION 1..10: note = Synthetic
AKDRGGYWVY

SEQ ID NO: 1171 - protein, 106 aa, synthetic construct
  REGION 1..106: note = Synthetic
SYVLTQPPSVSVSPGQTANITCFGDKLGDKYACWYQQKPGQSPVLVIYQDTKRPSGIPERFSGSNSGNTATLTISGTQAMDEADYYCQAWDSSTGVFGTGTKVTVL

SEQ ID NO: 1172 - protein, 9 aa, synthetic construct
  REGION 1..9: note = Synthetic
QAWDSSTGV

SEQ ID NO: 1173 - protein, 124 aa, synthetic construct; identical to SEQ ID NO: 171
  REGION 1..124: note = Synthetic

SEQ ID NO: 1174 - protein, 17 aa, synthetic construct
  REGION 1..17: note = Synthetic
AKAERIIMMVVVTLFDY

SEQ ID NO: 1175 - protein, 110 aa, synthetic construct
  REGION 1..110: note = Synthetic
QFVLTQPPSVSAAPGQKVTISCSGSSSNIGNNYVSWYQQLPGTAPKLLIYENNKRPSGIPDRFSGSKSGTSATLGITGLQTGDEADYYCGTWDSSLSAWVFGGGTKLTVL

SEQ ID NO: 1176 - protein, 11 aa, synthetic construct
  REGION 1..11: note = Synthetic
GTWDSSLSAWV

SEQ ID NO: 1177 - protein, 123 aa, synthetic construct; identical to SEQ ID NO: 195
  REGION 1..123: note = Synthetic

SEQ ID NO: 1178 - protein, 16 aa, synthetic construct
  REGION 1..16: note = Synthetic
ARERAARLYYYYYMDV

SEQ ID NO: 1179 - protein, 112 aa, synthetic construct
  REGION 1..112: note = Synthetic
QSVLTQPASVSGSPGQSITISCTGTSSDVGSYNLVSWYQQHPGKAPKLMIYDVSKRPSGVSNRFFGSKSGNTASLTIFGLQAEDEADYYCCSYAGSSTSHVVFGGGTKLTVL

SEQ ID NO: 1180 - protein, 12 aa, synthetic construct
  REGION 1..12: note = Synthetic
CSYAGSSTSHVV

SEQ ID NO: 1181 - protein, 122 aa, synthetic construct
  REGION 1..122: note = Synthetic
QVQLVQSGAEVKKPGASVKVSCKVSGYTLIELSIHWVRQAPGKGLEWMGGFDPEDGETIYAQKFQGRVTMTEDTSTDTAYMELSSLRSEDTAVYYCATGGVQLESRGWFDPWGQGTLVTVSS

SEQ ID NO: 1182 - protein, 15 aa, synthetic construct
  REGION 1..15: note = Synthetic
ATGGVQLESRGWFDP

SEQ ID NO: 1183 - protein, 110 aa, synthetic construct
  REGION 1..110: note = Synthetic
QFVLTQPASVSGSPGQSITISCTGTSRDVGGYNYVSWYQQHPGKAPKLMIYEVSNRPSGVSNRFSGSKSGNTASLTISGLQAEDEADYYCSSYTSSSTYVFGTGTKVTVL

SEQ ID NO: 1184 - protein, 10 aa, synthetic construct
  REGION 1..10: note = Synthetic
SSYTSSSTYV

SEQ ID NO: 1185 - protein, 121 aa, synthetic construct; identical to SEQ ID NO: 181
  REGION 1..121: note = Synthetic

SEQ ID NO: 1186 - protein, 14 aa, synthetic construct
  REGION 1..14: note = Synthetic
AVNSAEVTTYWFDP

SEQ ID NO: 1187 - protein, 110 aa, synthetic construct
  REGION 1..110: note = Synthetic
QFVLTQPPSVSGSPGQSVTISCTGTSSDVGSYDRVSWYRQPPGTAPKLMIYEVSNRPSGVPDRFSGSKSGNTASLTISGLQAEDEADYYCTSYTSSSPVVFGGGTKLTVL

SEQ ID NO: 1188 - protein, 10 aa, synthetic construct
  REGION 1..10: note = Synthetic
TSYTSSSPVV

SEQ ID NO: 1189 - protein, 120 aa, synthetic construct; identical to SEQ ID NO: 187
  REGION 1..120: note = Synthetic

SEQ ID NO: 1190 - protein, 13 aa, synthetic construct
  REGION 1..13: note = Synthetic
AKDMGYSSGTLDY

SEQ ID NO: 1191 - protein, 110 aa, synthetic construct
  REGION 1..110: note = Synthetic
QFVLTQPPSASGTPGQRVTISCSGSSSNIGSNYVYWYQQLPGTAPKLLIYRNNQRPSGVPDRFSGSKSGTSASLAISGLRSEDEADYYCAAWDDSLSGVVFGGGTKLTVL

SEQ ID NO: 1192 - protein, 11 aa, synthetic construct
  REGION 1..11: note = Synthetic
AAWDDSLSGVV

SEQ ID NO: 1193 - protein, 117 aa, synthetic construct
  REGION 1..117: note = Synthetic
EVQLLESGGGLVQPGGSLRLSCAASGFTFSSYAMSWVRQAPGKGLEWVSSISASGGSTYYADSVKGRFIISRDNSKNTLYLQMNSLRAEDTALYYCELSEIGAFDIWGQGTMVTVSS

SEQ ID NO: 1194 - protein, 10 aa, synthetic construct
  REGION 1..10: note = Synthetic
ELSEIGAFDI

SEQ ID NO: 1195 - protein, 106 aa, synthetic construct
  REGION 1..106: note = Synthetic
SYELTQPSSVSVFPGQTARITCSGDVLAKKYARWFQQKPGQAPVVVIYKDSERPSGIPERFSGSSSGTTVTLTISGAQVEDEADYYCYSAADSSWVFGGGTKLTVL

SEQ ID NO: 1196 - protein, 9 aa, synthetic construct
  REGION 1..9: note = Synthetic
YSAADSSWV

SEQ ID NO: 1197 - protein, 123 aa, synthetic construct; identical to SEQ ID NO: 193
  REGION 1..123: note = Synthetic

SEQ ID NO: 1198 - protein, 16 aa, synthetic construct
  REGION 1..16: note = Synthetic
ARDWCGRTSCHYYMDV

SEQ ID NO: 1199 - protein, 112 aa, synthetic construct
  REGION 1..112: note = Synthetic
QFVLTQPASVSGSPGQSITISCTGTSSDVGSYNLVSWYQQHPGKAPKLMIYEGSKRPSGVSNRFSGSKSGNTASLTISGLQAEDEADYYCCSYAGSSTLPYVFGTGTKVTVL

SEQ ID NO: 1200 - protein, 12 aa, synthetic construct
  REGION 1..12: note = Synthetic
CSYAGSSTLPYV

SEQ ID NO: 1201 - protein, 128 aa, synthetic construct; identical to SEQ ID NO: 165
  REGION 1..128: note = Synthetic

SEQ ID NO: 1202 - protein, 21 aa, synthetic construct
  REGION 1..21: note = Synthetic
ARDFTVTTSTTSTNYYYGMDV

SEQ ID NO: 1203 - protein, 108 aa, synthetic construct
  REGION 1..108: note = Synthetic
SYVLTQPPSVSVSPGQTARITCSGDALPKQYAYWYQQKPGQAPVVVIYKDSERPSGIPERFSGSSSGTTVTVTISGVQAEDEGDYYCQSADSSGSYVVFGGGTKLTVL

SEQ ID NO: 1204 - protein, 11 aa, synthetic construct
  REGION 1..11: note = Synthetic
QSADSSGSYVV

SEQ ID NO: 1205 - protein, 117 aa, synthetic construct
  REGION 1..117: note = Synthetic
EVQLVESGGGLVQPGGSLRLSCAASGFTFSTYSMNWVRQAPGKGLEWVSYISSSSSSIYYADSVKGRFTISRDNAKNSLYLQMSSLRAEDTAVYYCARGPSHAFDIWGQGTMVTVSS

SEQ ID NO: 1206 - protein, 10 aa, synthetic construct
  REGION 1..10: note = Synthetic
ARGPSHAFDI

SEQ ID NO: 1207 - protein, 107 aa, synthetic construct
  REGION 1..107: note = Synthetic
SYVLTQPPSVSVSPGQTASITCSGDKLGDKYACWYQQKPGQSPVLVIYQDSKRPSGIPERFSGSNSGNTATLTISGTQAMDEADYYCQAWDSSTHVVFGGGTKLTVL

SEQ ID NO: 1208 - protein, 10 aa, synthetic construct
  REGION 1..10: note = Synthetic
QAWDSSTHVV

SEQ ID NO: 1209 - protein, 121 aa, synthetic construct; identical to SEQ ID NO: 179
  REGION 1..121: note = Synthetic

SEQ ID NO: 1210 - protein, 14 aa, synthetic construct
  REGION 1..14: note = Synthetic
ATVGQRQLEGWFDP

SEQ ID NO: 1211 - protein, 111 aa, synthetic construct
  REGION 1..111: note = Synthetic
QSVLTQPPSASGSPGQSVTISCTGTSSDVGGYNYVSWYQQHPGKAPKLMIYEVSKRPSGVPDRFSGSKSGNTASLIVSGLQAEDEADYYCSSYAGSNNPFVFGSGTKVTVL

SEQ ID NO: 1212 - protein, 11 aa, synthetic construct
  REGION 1..11: note = Synthetic
SSYAGSNNPFV

SEQ ID NO: 1213 - protein, 123 aa, synthetic construct
  REGION 1..123: note = Synthetic
QVQLQESGPGLVKPSETLSLTCTVSGGSISSSYWSWIRQPPGKGLEWIGYISYSGSTNYNPSLKSRVTISVDTSKNQFSLKLSSVTAADTAVYYCARHEGEGNYSYYYGMDVWAQGTTVTVSS

SEQ ID NO: 1214 - protein, 17 aa, synthetic construct
  REGION 1..17: note = Synthetic
ARHEGEGNYSYYYGMDV

SEQ ID NO: 1215 - protein, 108 aa, synthetic construct
  REGION 1..108: note = Synthetic
SYVLTQPPSVSVSPRQTARITCSGDALPKQYAYWYQQKPGQAPVLVIYKDSERPSGIPERFSGSSSGTTVTLTISGVQAEDEADYYCQSTDSSGSYAVFGGGTKLTVL

SEQ ID NO: 1216 - protein, 11 aa, synthetic construct
  REGION 1..11: note = Synthetic
QSTDSSGSYAV

SEQ ID NO: 1217 - protein, 121 aa, synthetic construct
  REGION 1..121: note = Synthetic
QVQLVQSGAEVKKPGASVKVSCKASGYTFSGYYMHWVRQAPGQGLEWMGWINPNSGGTNYAQKFQGRVTMTRDTSISTAYMELSRLRSDDTAVYYCAREEITVLRGVFDYWGQGTLVTVSS

SEQ ID NO: 1218 - protein, 14 aa, synthetic construct
  REGION 1..14: note = Synthetic
AREEITVLRGVFDY

SEQ ID NO: 1219 - protein, 110 aa, synthetic construct
  REGION 1..110: note = Synthetic
QSVLTQPASVSGSPGQSITISCTGTSSDVGSYNLVSWYQQHPGKAPKLMIYDVTKRPSGVSNRFSGSKSGNTASLTISGLQAEDEADYYCCSYAGWSTYVFGTGTKVTVL

SEQ ID NO: 1220 - protein, 10 aa, synthetic construct
  REGION 1..10: note = Synthetic
CSYAGWSTYV

SEQ ID NO: 1221 - protein, 126 aa, synthetic construct
  REGION 1..126: note = Synthetic
QVQLVQSGAEVKKSGASVKVSCKASGYTFTGYYIHWMRQAPGQGLEWVGRINPDNGGGNSAQKFQGRVTMTTDTSINTAYMELSGLTSDDTAVYFCARDYVLVWFGELLTNYFDAWGQGTLVTVSS

SEQ ID NO: 1222 - protein, 19 aa, synthetic construct
  REGION 1..19: note = Synthetic
ARDYVLVWFGELLTNYFDA

SEQ ID NO: 1223 - protein, 110 aa, synthetic construct
  REGION 1..110: note = Synthetic
QSVLTQPPSASGTPGQRVTISCSGSSSNIGDNNVYWYQQFPGTAPKLLIYRSNQRPSGVSDRFSGSKSGTSASLAISGLRPEDEADYHCATWDDSLSVVVFGGGTKVTVL

SEQ ID NO: 1224 - protein, 11 aa, synthetic construct
  REGION 1..11: note = Synthetic
ATWDDSLSVVV

SEQ ID NO: 1225 - protein, 121 aa, synthetic construct
  REGION 1..121: note = Synthetic
EVQLVESGGGLVQPGGSLRLSCAASGFTFSSYWMSWVRQAPGKGLEWVANIKQDGSEKYYVDSVKGRFTISRDNAENSLYLQMNSLRAEDTAVYYCARGDYAYYYYYMDVWGKGTTVTVSS

SEQ ID NO: 1226 - protein, 14 aa, synthetic construct
  REGION 1..14: note = Synthetic
ARGDYAYYYYYMDV

SEQ ID NO: 1227 - protein, 106 aa, synthetic construct
  REGION 1..106: note = Synthetic
SYVLTQPPSVSVSPGQTASITCSGDKLGDKYACWYQQKSGQSPVLVIFEDFKRPSGIPERFSGSNSGNTATLTISGTQAMDEADYYCQAWDSSTVVFGGGTKLTVL

SEQ ID NO: 1228 - protein, 9 aa, synthetic construct
  REGION 1..9: note = Synthetic
QAWDSSTVV

SEQ ID NO: 1229 - protein, 124 aa, synthetic construct
  REGION 1..124: note = Synthetic
QVQLVESGGGVVQPGRSLRLSCAASGFTFSNYGMHWVRQAPGKGLEWVAVIWYDGSNKYYADSVKGRFTISRDNSKNTLYLQMNSLRAEDTAVYYCARGSFDSSAFYSFYFDYWGQGTLVTVSS

SEQ ID NO: 1230 - protein, 17 aa, synthetic construct
  REGION 1..17: note = Synthetic
ARGSFDSSAFYSFYFDY

SEQ ID NO: 1231 - protein, 110 aa, synthetic construct
  REGION 1..110: note = Synthetic
NFMLTQPHSVSESPGKTVTISCTGSSGSIASNYVQWYQQRPGSAPTTVIYEDNEGPSGVPDRFPGSIDSSSNSASLTISGLQTDDEVDYYCQSYDSDKNVSGSGTKVTVL

SEQ ID NO: 1232 - protein, 9 aa, synthetic construct
  REGION 1..9: note = Synthetic
QSYDSDKNV

SEQ ID NO: 1233 - protein, 124 aa, synthetic construct
  REGION 1..124: note = Synthetic
EVQLLESGGGLVQPGGSLRLSCAASGFTFSSYVMSWVRQAPGKGLEWVSGISGSGGSTYYADSVKGRFTISRDNSRNTLYLQMNSLRAEDTAVYYCAKDPGDQIYYYYYYMDVWGKGTTVTVSS

SEQ ID NO: 1234 - protein, 17 aa, synthetic construct
  REGION 1..17: note = Synthetic
AKDPGDQIYYYYYYMDV

SEQ ID NO: 1235 - protein, 112 aa, synthetic construct
  REGION 1..112: note = Synthetic
QSVXTQPASVSGSPGQSITISCTGTSSDVGSYNLVSWYQQHPGKAPKLMIYDVSKRPSGVSNRFSGSKSANTASLTISGLQAEDEADYYCCSYAGSSTSYVVFGGGTKLTVL

SEQ ID NO: 1236 - protein, 12 aa, synthetic construct
  REGION 1..12: note = Synthetic
CSYAGSSTSYVV

SEQ ID NO: 1237 - protein, 123 aa, synthetic construct
  REGION 1..123: note = Synthetic
QLQLQESGPGLVKPSETLSLTCIVSGGSISSSSYFWGWIRQPPGKGLEWIGSIDYSGNTYYNPSLKSRVTISVDTSKNQFSLKLSSVTAADTAVYCCARHPSSWYLVGWFDPWGQGTLVTVSS

SEQ ID NO: 1238 - protein, 15 aa, synthetic construct
  REGION 1..15: note = Synthetic
ARHPSSWYLVGWFDP

SEQ ID NO: 1239 - protein, 111 aa, synthetic construct
  REGION 1..111: note = Synthetic
QSVLTQPPSASGTPGQRVTISCSGSSSNIGNNYVYWYQQLPGTAPKLLIYRNNQRPSGVPDRFSGSTSGTSASLAISGLRSEDEADYYCAAWDDSLSGFYVFGTGTKVTVL

SEQ ID NO: 1240 - protein, 12 aa, synthetic construct
  REGION 1..12: note = Synthetic
AAWDDSLSGFYV

SEQ ID NO: 1241 - protein, 122 aa, synthetic construct
  REGION 1..122: note = Synthetic
QVQLQESGPGLVKPSETLSLTCTMSDGSISSYYWNWIRQPPGKGLEWIGYIYYSGTTNYNPSLKSRVTISVDTSKNQFSLNLSSVTAADTAVYYCARLYFDNSGYYGYFDDWGQGTLVTVSS

SEQ ID NO: 1242 - protein, 16 aa, synthetic construct
  REGION 1..16: note = Synthetic
ARLYFDNSGYYGYFDD

SEQ ID NO: 1243 - protein, 108 aa, synthetic construct
  REGION 1..108: note = Synthetic
SYVLTQPPSVSVSPGQTARITCSGDALSKQYAYWYQQKPGQAPVVVIYKDSERPSGIPERFSGSSSGTTVTLTISGVQAEDEADYYCQSADSSGTHVVFGGGTKLTVL

SEQ ID NO: 1244 - protein, 11 aa, synthetic construct
  REGION 1..11: note = Synthetic
QSADSSGTHVV

SEQ ID NO: 1245 - protein, 120 aa, synthetic construct; identical to SEQ ID NO: 189
  REGION 1..120: note = Synthetic

SEQ ID NO: 1246 - protein, 13 aa, synthetic construct
  REGION 1..13: note = Synthetic
ARNYYDSSDAFDI

SEQ ID NO: 1247 - protein, 107 aa, synthetic construct
  REGION 1..107: note = Synthetic
SYVLTQPPSVSVSPGQTARITCSGDALPKQYAYWYQQKPGQAPVLVIHKDSERPSGIPERFSGSSSGTTVTLTISGVQAEDEADYYCQSADSSGTYLFGGGTKLTVL

SEQ ID NO: 1248 - protein, 10 aa, synthetic construct
  REGION 1..10: note = Synthetic
QSADSSGTYL

SEQ ID NO: 1249 - protein, 115 aa, synthetic construct
  REGION 1..115: note = Synthetic
EVQLLESGGGLVQPGGSLRLSCAASGFTFSTYAMSWVRQAPGKGLEWVSAISGSGTSTYYADSVKGRFTISRDNSKNTLYLQMNSLRAEDTAVYYCAKGYSPDYWGQGTLVTVSS

SEQ ID NO: 1250 - protein, 8 aa, synthetic construct
  REGION 1..8: note = Synthetic
AKGYSPDY

SEQ ID NO: 1251 - protein, 108 aa, synthetic construct
  REGION 1..108: note = Synthetic
EIVMTQSPATLSVSPGERATLSCRASQTVSSNLAWYQQKPGQAPRLLIYGASTRATGIPARFSGSGSGTEFTLTISSLQSEDFAVYYCQQYNNWPPYTFGQGTKLEIK

SEQ ID NO: 1252 - protein, 10 aa, synthetic construct
  REGION 1..10: note = Synthetic
QQYNNWPPYT

SEQ ID NO: 1253 - protein, 123 aa, synthetic construct
  REGION 1..123: note = Synthetic
QLQLQESGPGLMKPSETLSLTCTVSGGSISNISYYWGWIRQPPGKGLEWIGTIYYSGGTYYNPSLKSRVTISVDTSKNQFSLKLSSVTAADTAVYYCARLLDFWSGFDVLDIWGQGTMVTVSS

SEQ ID NO: 1254 - protein, 15 aa, synthetic construct
  REGION 1..15: note = Synthetic
ARLLDFWSGFDVLDI

SEQ ID NO: 1255 - protein, 107 aa, synthetic construct
  REGION 1..107: note = Synthetic
DIQMTQSPSSLSASVGDRVTITCRASQGIRNDLGWFQQKPGKAPKRLIYAASSLQSGVPSRFSGSGSGTEFTLTISSLQPEDFATYYCLQHNSYPLTFGGGTKVEIK

SEQ ID NO: 1256 - protein, 9 aa, synthetic construct
  REGION 1..9: note = Synthetic
LQHNSYPLT

SEQ ID NO: 1257 - protein, 123 aa, synthetic construct
  REGION 1..123: note = Synthetic
EVQLLESGGGLVQPGGSLRLSCAASGFMFNTYAMTWVRQAPGKGLEWVSTITGSSRNTYYADSVKGRFTISRDNSQNTLYLQMNSLRAEDAAVYYCAKDYVKSTLVVVTVDYWGQGTLVTVSS

SEQ ID NO: 1258 - protein, 16 aa, synthetic construct
  REGION 1..16: note = Synthetic
AKDYVKSTLVVVTVDY

SEQ ID NO: 1259 - protein, 107 aa, synthetic construct
  REGION 1..107: note = Synthetic
DIQMTQSPSSLSASVGDRVTITCRASQXISXYLTWYQQQPGKAPKFLIYAASSLESGVPSRFSGSGSGTDFTLTIXSXQPEDFASYYCQQTYNTPFTFGQGTKVEIK

SEQ ID NO: 1260 - protein, 9 aa, synthetic construct
  REGION 1..9: note = Synthetic
QQTYNTPFT

SEQ ID NO: 1261 - protein, 126 aa, synthetic construct
  REGION 1..126: note = Synthetic
QVQLQESGPGLVKSSETLSLTCTVSGYSISSGYYWGWIRQPPGKGLEWIGSIYHSGSTFYNPSLKSRVTISVDTSKNQFSLKLSSVTAADTAVYYCARDTSITIFGVVTHSSFDYWGQGTLVTVSS

SEQ ID NO: 1262 - protein, 19 aa, synthetic construct
  REGION 1..19: note = Synthetic
ARDTSITIFGVVTHSSFDY

SEQ ID NO: 1263 - protein, 107 aa, synthetic construct
  REGION 1..107: note = Synthetic
DIQMTQSPXXLSASVGDRVTITCRASQGIRNDLGWYQQKPGKAPKRLIYAASSLQSGVPSRFSGSGSGTEFTLTISSLQPEDFATYYCLQHNSYPLTFGGGTKVEIK

SEQ ID NO: 1264 - protein, 9 aa, synthetic construct
  REGION 1..9: note = Synthetic
LQHNSYPLT

SEQ ID NO: 1265 - protein, 125 aa, synthetic construct
  REGION 1..125: note = Synthetic
QVQLVQSGAEVKKPGASVKVSCKASGYTFTSYGISWVRQAPGQGLEWMGWISAYDGNTNYAQKLQGRVTMTTDTSTSTAYMELRSLISDDTAVYYCARGTIYGDYEDPQAELDPWGQGTLVTVSS

SEQ ID NO: 1266 - protein, 18 aa, synthetic construct
  REGION 1..18: note = Synthetic
ARGTIYGDYEDPQAELDP

SEQ ID NO: 1267 - protein, 107 aa, synthetic construct
  REGION 1..107: note = Synthetic
DIQMTQSPSSLSASVGDRVTITCRASQGISNYLVWFQQKPGKAPKSLIYAASSLQSGAPSKFSGSGSGTDFTLTISSLQPEDFATYYCQQYKSYPLTFGGGTKVEIK

SEQ ID NO: 1268 - protein, 9 aa, synthetic construct
  REGION 1..9: note = Synthetic
QQYKSYPLT

SEQ ID NO: 1269 - protein, 120 aa, synthetic construct
  REGION 1..120: note = Synthetic
EVQLVQSGAEVKKPGESLRISCKGSGYSFTIYWISWVRQMPGKGLEWVGRIDPSDYYTNYSPSFQGHATISADKSISIVYLQWSSLKASDTAMYYCARQPLYSNGWFDYWGQGTLVTVSS

SEQ ID NO: 1270 - protein, 13 aa, synthetic construct
  REGION 1..13: note = Synthetic
ARQPLYSNGWFDY

SEQ ID NO: 1271 - protein, 107 aa, synthetic construct
  REGION 1..107: note = Synthetic
DIQMTQSPSSLSASVGDRVTITCQASQDITNYLNWYQQKPGKAPKLLIYDASNLETGVPSRFSGSGSGTDFTFTISSLQPEDTATYYCQQYDDLPFTFGPGTKVDIK

SEQ ID NO: 1272 - protein, 9 aa, synthetic construct
  REGION 1..9: note = Synthetic
QQYDDLPFT

SEQ ID NO: 1273 - protein, 128 aa, synthetic construct; identical to SEQ ID NO: 167
  REGION 1..128: note = Synthetic

SEQ ID NO: 1274 - protein, 21 aa, synthetic construct
  REGION 1..21: note = Synthetic
ARVPQAGAAQGHYYYYYGMDV

SEQ ID NO: 1275 - protein, 108 aa, synthetic construct
  REGION 1..108: note = Synthetic
EIVLTQSPGTLSLSPGERATLSCRASQSVTSSYLAWYQQKPGQAPRLLIYGASSRVTGIPDRFSGSGSGTDFTLTISRLEPEDFAVYYCQQYGSSPLTFGGGTRVEIK

SEQ ID NO: 1276 - protein, 9 aa, synthetic construct
  REGION 1..9: note = Synthetic
QQYGSSPLT

SEQ ID NO: 1277 - protein, 132 aa, synthetic construct; identical to SEQ ID NO: 161
  REGION 1..132: note = Synthetic

SEQ ID NO: 1278 - protein, 25 aa, synthetic construct
  REGION 1..25: note = Synthetic
ARDSWEVPRAYYYDSFEYQGLVPDY

SEQ ID NO: 1279 - protein, 107 aa, synthetic construct
  REGION 1..107: note = Synthetic
AIQMTQSPSSLSASVGDRVTITCRASQDIRNDLGWYQQKPGQAPRLMIYAASSLESGVPSRFSGSGSGTDFTLTISSLQPEDFATYYCLQDYNYPRTFGQGTKLEIK

SEQ ID NO: 1280 - protein, 9 aa, synthetic construct
  REGION 1..9: note = Synthetic
LQDYNYPRT

SEQ ID NO: 1281 - protein, 126 aa, synthetic construct
  REGION 1..126: note = Synthetic
EVQLLESGGGLVQPGGSLRLSCAASGFTFSSYAMSWVRQAPGKGLEWVSAISGSGGSTYYADSVKGRFTISRDNSKSTLYLQMNSLRAEDTAVYYCATPRDQFCSGGSCYGPLDYWGQGTLVTVSS

SEQ ID NO: 1282 - protein, 19 aa, synthetic construct
  REGION 1..19: note = Synthetic
ATPRDQFCSGGSCYGPLDY

SEQ ID NO: 1283 - protein, 106 aa, synthetic construct
  REGION 1..106: note = Synthetic
DIQMTQSPSSLSASVGDRVTITCQASQDISNYLNWYQQKPGKAPNLLIYDASNLETGVPSRFSGSGSGTDFTFTISSLQPEDIATYYCQQYDNLPTFGQGTKLEIK

SEQ ID NO: 1284 - protein, 8 aa, synthetic construct
  REGION 1..8: note = Synthetic
QQYDNLPT

SEQ ID NO: 1285 - protein, 123 aa, synthetic construct
  REGION 1..123: note = Synthetic
QLQLQESGPGLVKPSETLSLTCTVSGGSISSSSYYWGWIRQPPGKGLEWIGNIYYFGSTYYNPSLKSRVTISVDTSKNQFSLKLSSVTAADTAAYYCARHVLDYTDYGSIDYWGQGTLVTVSS

SEQ ID NO: 1286 - protein, 15 aa, synthetic construct
  REGION 1..15: note = Synthetic
ARHVLDYTDYGSIDY

SEQ ID NO: 1287 - protein, 107 aa, synthetic construct
  REGION 1..107: note = Synthetic
DIQMTQSPXTLSASVGDRVTITCRASQGIRNDLGWYQQKPGKAPKRLIYAASGLQSGVPSRFSGSGSGTEFTLTISSLQPEDFATYYCLQHNSYPLTFGGGTKVEIK

SEQ ID NO: 1288 - protein, 9 aa, synthetic construct
  REGION 1..9: note = Synthetic
LQHNSYPLT

SEQ ID NO: 1289 - protein, 124 aa, synthetic construct
  REGION 1..124: note = Synthetic
EVQLVESGGGLVQPGRSLRLSCAASGFTFDDYAIHWVRQAPGKGLEWVSGISWNSDTIAYADSVKGRFAISRDNAKNSLYLQMNNLRAEDTALYYCAKVNIRGVPYGLGAFDIWGQGTMVTVSS

SEQ ID NO: 1290 - protein, 17 aa, synthetic construct
  REGION 1..17: note = Synthetic
AKVNIRGVPYGLGAFDI

SEQ ID NO: 1291 - protein, 107 aa, synthetic construct
  REGION 1..107: note = Synthetic
AIQMTQSPFSLSASVGDRVTITCRASQGIRNDLGWYQQKPGKAPKLLIYAASSLQSGVPSRFSGSGSGTDFTLTISGLQPEDFATYYCLQDYNYPRTFGQGTKLEIK

SEQ ID NO: 1292 - protein, 9 aa, synthetic construct
  REGION 1..9: note = Synthetic
LQDYNYPRT

SEQ ID NO: 1293 - protein, 122 aa, synthetic construct
  REGION 1..122: note = Synthetic
QVQLVQSGAEVKKPGASVKVSCKASGYTFTSYGISWVRQAPGQGLEWMGWISAYNGNTNYAQKLQGRVTMTTDTSTSTAYMELRSLRSDDTAVYYCARAAYVLYSIHPFDYWGQGTLVTVSS

SEQ ID NO: 1294 - protein, 15 aa, synthetic construct
  REGION 1..15: note = Synthetic
ARAAYVLYSIHPFDY

SEQ ID NO: 1295 - protein, 107 aa, synthetic construct
  REGION 1..107: note = Synthetic
EIVLTQSPATLSLSPGERATLSCRASQSVSSYLAWYQQKPGQAPRLLIYDASNRATGIPARFSGSGSGTGFTLTISSLEPEDFAVYYCQQRTNWPPTFGQGTRLEIK

SEQ ID NO: 1296 - protein, 9 aa, synthetic construct
  REGION 1..9: note = Synthetic
QQRTNWPPT

SEQ ID NO: 1297 - protein, 123 aa, synthetic construct
  REGION 1..123: note = Synthetic
QVQLQESGPGLVKPSETLSLTCTVSGGSISPYYWSWVRQTPEKGLEWIGYIYYSGSTNYNPSLKSRVTMSVDTSKNQFSLKLGFVTAADTAVYYCVRHLGPAAIPYYYGMDVWGRGTTVTVSS

SEQ ID NO: 1298 - protein, 17 aa, synthetic construct
  REGION 1..17: note = Synthetic
VRHLGPAAIPYYYGMDV

SEQ ID NO: 1299 - protein, 106 aa, synthetic construct
  REGION 1..106: note = Synthetic
DIQMTQSPSSVSASVGDSVTITCRASQPINNWLTWYQQKPGKAPKLLIFATSTLNSGVPSRFSGSGSGTEFTLTISSLQPEDFATYYCQQANSFPQTFGQGTKVDI

SEQ ID NO: 1300 - protein, 9 aa, synthetic construct
  REGION 1..9: note = Synthetic
QQANSFPQT

SEQ ID NO: 1301 - protein, 132 aa, synthetic construct; identical to SEQ ID NO: 197
  REGION 1..132: note = Synthetic

SEQ ID NO: 1302 - protein, 25 aa, synthetic construct
  REGION 1..25: note = Synthetic
ARDSWEVPRYYYYDSTDYQGLVPDH

SEQ ID NO: 1303 - protein, 107 aa, synthetic construct
  REGION 1..107: note = Synthetic
AIQMTQSPSSLSASVGDRVTITCRASQGIRNDLGWYQQKPGKAPKLLIYAASSLQSGVPSRFSGSGSGTDFTLTISSLQPEDFATYYCLQDYNYPRTFGQGTKLEIK

SEQ ID NO: 1304 - protein, 9 aa, synthetic construct
  REGION 1..9: note = Synthetic
LQDYNYPRT

SEQ ID NO: 1305 - protein, 124 aa, synthetic construct; identical to SEQ ID NO: 169
  REGION 1..124: note = Synthetic

SEQ ID NO: 1306 - protein, 17 aa, synthetic construct
  REGION 1..17: note = Synthetic
ARDQGYGDYFEYNWFDP

SEQ ID NO: 1307 - protein, 107 aa, synthetic construct; identical to SEQ ID NO: 170
  REGION 1..107: note = Synthetic

SEQ ID NO: 1308 - protein, 9 aa, synthetic construct
  REGION 1..9: note = Synthetic
QQLNSYPIT

SEQ ID NO: 1309 - protein, 127 aa, synthetic construct; identical to SEQ ID NO: 163
  REGION 1..127: note = Synthetic

SEQ ID NO: 1310 - protein, 20 aa, synthetic construct
  REGION 1..20: note = Synthetic
ARDPTDHYDFWSGYYYGMDV

SEQ ID NO: 1311 - protein, 107 aa, synthetic construct
  REGION 1..107: note = Synthetic
EIVLTQSPXXLSLSPGERATLSCRASHSVSSYLAWYQQKPGQAPRLLIYDASKRATGIPARFSGSGSGTGFTLTISSLEAEDFAVYYCQQRSNWSYTFGQGTKLEIK

SEQ ID NO: 1312 - protein, 9 aa, synthetic construct
  REGION 1..9: note = Synthetic
QQRSNWSYT

SEQ ID NO: 1313 - protein, 121 aa, synthetic construct
  REGION 1..121: note = Synthetic
QVQLQESGPGLVKPSETLSLTCTVSGGSISNYYWSWIRQPPGKGLEWXGYIYSYVQMQESGPGMGRVTISIDTSKKQFSLKLSSVTAADTAVYYCARQEWFGELLNWFDPWGQGTLVTVSS

SEQ ID NO: 1314 - protein, 15 aa, synthetic construct
  REGION 1..15: note = Synthetic
ARQEWFGELLNWFDP

SEQ ID NO: 1315 - protein, 106 aa, synthetic construct
  REGION 1..106: note = Synthetic
EIVMTQSPXXLSVSPGERATLSCRASQSVRSNLAWYQQKSGQAPRLLIYGASTRATGIPARFSGSGSGTEFTLTISSLQSEDFAVYYCQQYNNWPQTFGQGTKVEI

SEQ ID NO: 1316 - protein, 9 aa, synthetic construct
  REGION 1..9: note = Synthetic
QQYNNWPQT

SEQ ID NO: 1317 - protein, 121 aa, synthetic construct; identical to SEQ ID NO: 159
  REGION 1..121: note = Synthetic

SEQ ID NO: 1318 - protein, 13 aa, synthetic construct
  REGION 1..13: note = Synthetic
ARVHGDYDYYMDV

SEQ ID NO: 1319 - protein, 107 aa, synthetic construct
  REGION 1..107: note = Synthetic
DIQMTQSPXXLSASVGDRVTITCRASQSISSWLAWYQQKPGKAPKLLIYKASSLESGVPSRFSGSGSGTEFTLTISSLQPDDFATYYCQQYNSYSLTFGGGTKVEIK

SEQ ID NO: 1320 - protein, 9 aa, synthetic construct
  REGION 1..9: note = Synthetic
QQYNSYSLT

SEQ ID NO: 1321 - protein, 131 aa, synthetic construct
  REGION 1..131: note = Synthetic
QVQLVESGGGVVQPGRSLRLSCAASGFTFSSYGMHWVRQAPGKGLEWVAVILYDGNNKYYADSVKGRFTISRDNSKNTLYLQMNSLRAEDTAVYYCAKLYSRVNYAFWSGYLDPDYGMDVWGQGTTVTVSS

SEQ ID NO: 1322 - protein, 24 aa, synthetic construct
  REGION 1..24: note = Synthetic
AKLYSRVNYAFWSGYLDPDYGMDV

SEQ ID NO: 1323 - protein, 108 aa, synthetic construct
  REGION 1..108: note = Synthetic
DIQMTQSPSSLSASVGDRVTITCQASQGISNYLNWYQQKPGKAPNLLIYDASNLETGVPSRFSGSGSGTDFTLTISSLQPEDIATYYCQQYDNLPPFTFGPGTKVDIK

SEQ ID NO: 1324 - protein, 10 aa, synthetic construct
  REGION 1..10: note = Synthetic
QQYDNLPPFT

SEQ ID NO: 1325 - protein, 127 aa, synthetic construct
  REGION 1..127: note = Synthetic
QVQLVESGGGVVQPGRSLRLSCAASGFTFSSSGMHWVRQAPGKGLEWVAVIWYDGSNKYYADSVKGRFTISRDNSKNMLYLQMNSLRAEDTAVYYCARDPTDYYDFWSGYYYGMDVWGQGTTVTVSS

SEQ ID NO: 1326 - protein, 20 aa, synthetic construct
  REGION 1..20: note = Synthetic
ARDPTDYYDFWSGYYYGMDV

SEQ ID NO: 1327 - protein, 107 aa, synthetic construct
  REGION 1..107: note = Synthetic
EIVLTQSPATLSLSPGERATLSCRASQSVSSYLAWYQQKPGQAPRRLIYDASNRATGIPARFSGSGSGTGFTLTIRSVEPEDFAVYYCQQRSNWSCTFGQGTKLEIK

SEQ ID NO: 1328 - protein, 9 aa, synthetic construct
  REGION 1..9: note = Synthetic
QQRSNWSCT

SEQ ID NO: 1329 - protein, 117 aa, synthetic construct; identical to SEQ ID NO: 1121
  REGION 1..117: note = Synthetic

SEQ ID NO: 1330 - protein, 11 aa, synthetic construct
  REGION 1..11: note = Synthetic
ARSYGDYYFDS

SEQ ID NO: 1331 - protein, 113 aa, synthetic construct
  REGION 1..113: note = Synthetic
DIVMTQSPDSLAVSXGERAAINCKSSQSVLYSSNNKNYLTWYQQKPGQPPKLLIYWASTRESGVPDRFSGSGSGTDFTLTISSLQAEDVAVYYCQQYYSTPLTFGGGTKVEIK

SEQ ID NO: 1332 - protein, 9 aa, synthetic construct
  REGION 1..9: note = Synthetic
QQYYSTPLT

SEQ ID NO: 1333 - protein, 123 aa, synthetic construct
  REGION 1..123: note = Synthetic
QLQLQESGPGLVKPSETLSLTCTVSGGSISSSSYYWGWIRQPPGKGLEWIGSIYYSGTTYYNPSLKSRVTISVDTSKNQFSLKLSSVTAADMAVYYCARDLYQYDSSGIFDYWGQGTPVTVSS

SEQ ID NO: 1334 - protein, 15 aa, synthetic construct
  REGION 1..15: note = Synthetic
ARDLYQYDSSGIFDY

SEQ ID NO: 1335 - protein, 107 aa, synthetic construct; identical to SEQ ID NO: 326
  REGION 1..107: note = Synthetic

SEQ ID NO: 1336 - protein, 9 aa, synthetic construct
  REGION 1..9: note = Synthetic
LQHNSYPLT

SEQ ID NO: 1337 - protein, 124 aa, synthetic construct
  REGION 1..124: note = Synthetic
EVQLVESGGGLVQPGRSLRLSCAASGFTFDDYAIHWVRQAPGKGLEWVSGISWNSGTIAYADSVKGRFTISRDNAKNSLYLQMNSLRAEDTALYYCAKESRFRSTFGVGEFDYWGQGTLVTVSS

SEQ ID NO: 1338 - protein, 17 aa, synthetic construct
  REGION 1..17: note = Synthetic
AKESRFRSTFGVGEFDY

SEQ ID NO: 1339 - protein, 107 aa, synthetic construct
  REGION 1..107: note = Synthetic
AIQMTQSPXSLSASVGDRVTITCRASQGIRNDLGWYQQKPGKAPKLLIYGASSLQSGVPSRFSGSGSGTDFTLTISSLQPEDFATYYCLQDYNYPRTFGQGTKVEIK

SEQ ID NO: 1340 - protein, 9 aa, synthetic construct
  REGION 1..9: note = Synthetic
LQDYNYPRT

SEQ ID NO: 1341 - protein, 125 aa, synthetic construct
  REGION 1..125: note = Synthetic
EVQLLESGGGLVQQGGSLRLSCAASGFIFGSFTMSWVRQAPGKGLEWVSGISGYGAGTYFADSVKGRFTISRDNAKNTLDLQMNGLRDEDTAVYYCARDSIHCSGSTCYEGVYEIWGQGTVVIVS

SEQ ID NO: 1342 - protein, 19 aa, synthetic construct
  REGION 1..19: note = Synthetic
ARDSIHCSGSTCYEGVYEI

SEQ ID NO: 1343 - protein, 107 aa, synthetic construct
  REGION 1..107: note = Synthetic
DIQLTQSPVSLSASVGDSVTITCRASRGISSFLAWYQQKPGKAPNLLIYAASTLQSGVPSRFRGSGSETEFTLTITSLQPEDFATYYCQRLNSYPRTFGQGTKVEVK

SEQ ID NO: 1344 - protein, 9 aa, synthetic construct
  REGION 1..9: note = Synthetic
QRLNSYPRT

SEQ ID NO: 1345 - protein, 128 aa, synthetic construct; identical to SEQ ID NO: 209
  REGION 1..128: note = Synthetic

SEQ ID NO: 1346 - protein, 21 aa, synthetic construct
  REGION 1..21: note = Synthetic
ARDFTETTVTTSTNYYYGMDV

SEQ ID NO: 1347 - protein, 108 aa, synthetic construct
  REGION 1..108: note = Synthetic
SYVLTQPPSVSVSPGQTARITCSGDALPKQYAYWYQQKPGQAPVLVIYKDIERPSGIPERLSGSSSGTIVTLTISGVQAEDEADYYCQSADSSGSYVVFGGGTKLTVL

SEQ ID NO: 1348 - protein, 11 aa, synthetic construct
  REGION 1..11: note = Synthetic
QSADSSGSYVV

SEQ ID NO: 1349 - protein, 123 aa, synthetic construct
  REGION 1..123: note = Synthetic
QVQLVQSGAEVKRPGASVKVSCKVSGYTLPELSVHWVRQAPGKGLEWMGGFDPEDVETIYAQRFQGRVTMTEDTSTDTAYMELTSLRSEDTAVYYCIVIPAAPGYYYHAFDVWGQGTTVTVSS

SEQ ID NO: 1350 - protein, 16 aa, synthetic construct
  REGION 1..16: note = Synthetic
IVIPAAPGYYYHAFDV

SEQ ID NO: 1351 - protein, 109 aa, synthetic construct
  REGION 1..109: note = Synthetic
QSVLTQPASVSGSPGQSTTISCTGTSSDVGSYKLVSWYQQHPGRAPKLIIYDVNKRPSGVSNRFSGSKSGNTASLTISGLQAEDEAYYYCCSYVPDSTFVFGTGTKVTV

SEQ ID NO: 1352 - protein, 10 aa, synthetic construct
  REGION 1..10: note = Synthetic
CSYVPDSTFV

SEQ ID NO: 1353 - protein, 125 aa, synthetic construct; identical to SEQ ID NO: 221
  REGION 1..125: note = Synthetic

SEQ ID NO: 1354 - protein, 18 aa, synthetic construct
  REGION 1..18: note = Synthetic
ARSGLGMQLWLESYYFDH

SEQ ID NO: 1355 - protein, 112 aa, synthetic construct
  REGION 1..112: note = Synthetic
QSVLTQPASVSGSPGQSITISCTGTSSDVGTYNLVSWYQHHPGKAPKVMIYDVSKRPSGISNRFSGSKSGNTASLTISSLQAEDEADYYCCSYAGSSTLNVVFGGGTKLTVL

SEQ ID NO: 1356 - protein, 12 aa, synthetic construct
  REGION 1..12: note = Synthetic
CSYAGSSTLNVV

SEQ ID NO: 1357 - protein, 125 aa, synthetic construct; identical to SEQ ID NO: 205
  REGION 1..125: note = Synthetic

SEQ ID NO: 1358 - protein, 18 aa, synthetic construct
  REGION 1..18: note = Synthetic
AKEGDSSTWYYYYYYMDV

SEQ ID NO: 1359 - protein, 112 aa, synthetic construct
  REGION 1..112: note = Synthetic
QSVLTQPASVSGSPGQSITISCTGTSSDIGSYNLVSWYQQHPGKAPKLMIYDVTKRPSGVSNRFSGSKSGNTASLTISGLQAEDEADYYCCSYAGSNTFYVVFGGGTKLTVL

SEQ ID NO: 1360 - protein, 12 aa, synthetic construct
  REGION 1..12: note = Synthetic
CSYAGSNTFYVV

SEQ ID NO: 1361 - protein, 122 aa, synthetic construct
  REGION 1..122: note = Synthetic
QVQLVQSGAEVKKPGTSVKVSCKVSGYNLIEVSVHWVRQAPGKGLEWVGGFDPEDVETVYAQKFQGRVTMTEDTSTDTAYMELSSLRSEDTAVYYCATGPALLPKTHYFDYWGQGTLVTVSP

SEQ ID NO: 1362 - protein, 15 aa, synthetic construct
  REGION 1..15: note = Synthetic
ATGPALLPKTHYFDY

SEQ ID NO: 1363 - protein, 110 aa, synthetic construct
  REGION 1..110: note = Synthetic
QSVLTQPASVSGSPGQSITISCTGTSSDVGSYNLVSWYQHHPGKAPKLMIYEASKRPSGVSNRFSGSKSGNTASLTISGLQAEDEADYYCSSYAGTKTYVFGSGTKVTVL

SEQ ID NO: 1364 - protein, 10 aa, synthetic construct
  REGION 1..10: note = Synthetic
SSYAGTKTYV

SEQ ID NO: 1365 - protein, 124 aa, synthetic construct
  REGION 1..124: note = Synthetic
QVQLVESGGGVVQPGRSLRLSCAASGFPISSYPMHWVRQAPGKGLQWVAIISYDGSSKHYADSVKGRFTISRDNSKSMVFLQMNNLTTEETAVYFCARGAYDGSGFRNGWVDPWGQGTLVTVSS

SEQ ID NO: 1366 - protein, 17 aa, synthetic construct
  REGION 1..17: note = Synthetic
ARGAYDGSGFRNGWVDP

SEQ ID NO: 1367 - protein, 110 aa, synthetic construct
  REGION 1..110: note = Synthetic
QSVLTQPPSASGTPGQRVTISCSGSGSNIGNNFVYWYQQLPGTAPKLLIYRNNQRPSGVPDRFSGSKSGTSASLAISGLRSEDEADYYCATWDDSLSGGVFGGGTKVTVL

SEQ ID NO: 1368 - protein, 11 aa, synthetic construct
  REGION 1..11: note = Synthetic
ATWDDSLSGGV

SEQ ID NO: 1369 - protein, 126 aa, synthetic construct
  REGION 1..126: note = Synthetic
EVQLLESGGGLVQPGGSLRLSCAASGFPFSSYAMSWVRQAPGKGLEWVSGIKISGGSTHYADSVKGRFTISRDNSKNTLYLQMNSLRVEDTGVYYCAKDRPPRWVAAAGMGAFDIWGHGTRVTVSS

SEQ ID NO: 1370 - protein, 19 aa, synthetic construct
  REGION 1..19: note = Synthetic
AKDRPPRWVAAAGMGAFDI

SEQ ID NO: 1371 - protein, 108 aa, synthetic construct
  REGION 1..108: note = Synthetic
SYVLTQPPSVSVAPGKTARITCGGYNIGSKSVHWYQQKPGQAPVLVIYYDTDRPSGIPERFSGSNSGNTATLTINRVQAGDEADYYCQIWDSSSDNWVFGGGTELTVL

SEQ ID NO: 1372 - protein, 11 aa, synthetic construct
  REGION 1..11: note = Synthetic
QIWDSSSDNWV

SEQ ID NO: 1373 - protein, 124 aa, synthetic construct; identical to SEQ ID NO: 219
  REGION 1..124: note = Synthetic

SEQ ID NO: 1374 - protein, 17 aa, synthetic construct
  REGION 1..17: note = Synthetic
AKAERITMIVVLTLFDY

SEQ ID NO: 1375 - protein, 110 aa, synthetic construct; identical to SEQ ID NO: 220
  REGION 1..110: note = Synthetic

SEQ ID NO: 1376 - protein, 11 aa, synthetic construct
  REGION 1..11: note = Synthetic
GTWDSSLSAWV

SEQ ID NO: 1377 - protein, 126 aa, synthetic construct
  REGION 1..126: note = Synthetic
EVQLLESGGGLVQPGGSLRLSCAASGFTFSTYAMSWVRQAPGKGLEWVSTISGRIASTYYADSVRGRFTISGDNSRNTLYLQMNSLRAEDTAVYYCAKDGAAVAGPSYYYYYMDVWGKGTTVTVSS

SEQ ID NO: 1378 - protein, 19 aa, synthetic construct
  REGION 1..19: note = Synthetic
AKDGAAVAGPSYYYYYMDV

SEQ ID NO: 1379 - protein, 112 aa, synthetic construct
  REGION 1..112: note = Synthetic
QFVLTQPASVXGSPGQSITISCTGTSSDIGSYNLVSWYQQHPGKAPKLMIYDVXKRPSGVSNRFSGSKSGNTASLTISGLQAEDEGDYYCCSYAGSTILYVIFGGGTKLTVX

SEQ ID NO: 1380 - protein, 12 aa, synthetic construct
  REGION 1..12: note = Synthetic
CSYAGSTILYVI

SEQ ID NO: 1381 - protein, 125 aa, synthetic construct
  REGION 1..125: note = Synthetic
EVQLVESGGGLLQSGGSLRLSCAASGFTFSTYSMNWVRQAPGKGLEWVSFISSSSLSIYYADSVKGRFTISRDNAKNSLYLQMNSLRAEDTAVYYCAREGYSSSPHYYYYYMDVWGKGTTVTVSS

SEQ ID NO: 1382 - protein, 18 aa, synthetic construct
  REGION 1..18: note = Synthetic
AREGYSSSPHYYYYYMDV

SEQ ID NO: 1383 - protein, 112 aa, synthetic construct
  REGION 1..112: note = Synthetic
QFVLTQPASVSGSPGQAITISCTGSSSDVGNYNLVSWYQHHPGKAPKLIIYEAIKRPSGVSDRFSGSKSGNTASLTISGLQAEDEADYYCCSYAGRSTFPYVFGAGTKVTVL

SEQ ID NO: 1384 - protein, 12 aa, synthetic construct
  REGION 1..12: note = Synthetic
CSYAGRSTFPYV

SEQ ID NO: 1385 - protein, 122 aa, synthetic construct
  REGION 1..122: note = Synthetic
QVQLVQSGAEVKKPGASVKVSCKVSVYTLVEVSIHWVRQAPGKGLEWMGGFDPENVETMYAQEFQGRVTMTEDTSTDTAYMELTSLRSEDTAVYYCATAFAHDYNYKGFDFWGQGTLVTVSA

SEQ ID NO: 1386 - protein, 15 aa, synthetic construct
  REGION 1..15: note = Synthetic
ATAFAHDYNYKGFDF

SEQ ID NO: 1387 - protein, 109 aa, synthetic construct
  REGION 1..109: note = Synthetic
QSVLTQEPSLTVSPGGTVTLTCGSSTGSVTSGHHPYWFQQKPGQAPITLIYDTTNKHTWTPVRFSGSLLGGKAALTLSGAQPDDEAGYYCLLSYRGARVFGGGTKLTVL

SEQ ID NO: 1388 - protein, 9 aa, synthetic construct
  REGION 1..9: note = Synthetic
LLSYRGARV

SEQ ID NO: 1389 - protein, 125 aa, synthetic construct
  REGION 1..125: note = Synthetic
EVQLVESGGGLVKPGGSLRLSCAASGFTFSDYTMNWVRQAPGKGLAWVSSISTSTNSIYYADSVRGRFTISRDNAKNSLYLQMNSLRAEDTAVYYCARYELGIQVWLESYYFDCWGQGALVTVSS

SEQ ID NO: 1390 - protein, 18 aa, synthetic construct
  REGION 1..18: note = Synthetic
ARYELGIQVWLESYYFDC

SEQ ID NO: 1391 - protein, 112 aa, synthetic construct
  REGION 1..112: note = Synthetic
QSVLTQPASVSGSPGQSITISCTGTSSDVGSYNLVSWYQHHPGKAPKLMIYDVNKRPSGVSNRFSGSKSGNTASLTISGLQAEDEADYYCCSYAGSTTSNVVFGGGTKLTVL

SEQ ID NO: 1392 - protein, 12 aa, synthetic construct
  REGION 1..12: note = Synthetic
CSYAGSTTSNVV

SEQ ID NO: 1393 - protein, 125 aa, synthetic construct
  REGION 1..125: note = Synthetic
EVQLLESGGGLVQPGGSLRLSCVVSGFSFRSYVMSWVRQAPGKGLEWVSAISGSGGRTYYADSVKGRFTISRDNSKNTLYMQMNTLRAEDTAVYYCAKDVEDVVVVVGVNYFDHWGRGTLVTVSS

SEQ ID NO: 1394 - protein, 18 aa, synthetic construct
  REGION 1..18: note = Synthetic
AKDVEDVVVVVGVNYFDH

SEQ ID NO: 1395 - protein, 108 aa, synthetic construct
  REGION 1..108: note = Synthetic
SYVLTQPPSVSVSPGQTARITCFGNAVSKQYGYWYQQKPGQAPVLVMYKDSERPSGIPERFSGSSSGTTVTLTIREVQAEDEADYYCQSSDSSGSYPWVFGRGTKLTV

SEQ ID NO: 1396 - protein, 12 aa, synthetic construct
  REGION 1..12: note = Synthetic
QSSDSSGSYPWV

SEQ ID NO: 1397 - protein, 125 aa, synthetic construct
  REGION 1..125: note = Synthetic
QVQLQESGPGLVKPSGTLSLTCTVSGGSISSSNWWSWVRQSPGKGLEWIGEIYHSGNTNYNPSLKSRVTISVDKSKNQFSLKLSSVTAADTAVYYCARGFGSAELGNQKYYFDCWGQGTLVTVSS

SEQ ID NO: 1398 - protein, 18 aa, synthetic construct
  REGION 1..18: note = Synthetic
ARGFGSAELGNQKYYFDC

SEQ ID NO: 1399 - protein, 110 aa, synthetic construct
  REGION 1..110: note = Synthetic
QSVLTQPASVSGSPGQSITISCTGTSSDVGSYNLVSWYQQHPGKAPKLMIYEGSKRPSGVSNRFSGSKSGNTASLTISGLQAEDEADYYCCSYAGSSTWVFGGGTKLTVL

SEQ ID NO: 1400 - protein, 10 aa, synthetic construct
  REGION 1..10: note = Synthetic
CSYAGSSTWV

SEQ ID NO: 1401 - protein, 125 aa, synthetic construct; identical to SEQ ID NO: 223
  REGION 1..125: note = Synthetic

SEQ ID NO: 1402 - protein, 18 aa, synthetic construct
  REGION 1..18: note = Synthetic
AKDFGTLQWFGEAYSFDY

SEQ ID NO: 1403 - protein, 112 aa, synthetic construct
  REGION 1..112: note = Synthetic
QFVLTQPASVSGSPGQSITISCTGTSSDVEGYDLVSWYQQHPGKAPKLIIYDVTKRPSGVSNRFSGSKSGNTAALTISGLQAEDEADYYCCSYAGSTTRPVVFGGGTELTVL

SEQ ID NO: 1404 - protein, 12 aa, synthetic construct
  REGION 1..12: note = Synthetic
CSYAGSTTRPVV

SEQ ID NO: 1405 - protein, 131 aa, synthetic construct
  REGION 1..131: note = Synthetic
EVQLLESGGGLVQPGGSLRLSCAASGFTFSSYAMSWVRQAPGKGLEWVSTISGSGGSTYYADSVKGRFTISRDNSKNTLYLQMNSLRAEDTAVYYCAKDGPLCSSGGSCYSFYHYFYMDVWGKGTTVTVSS

SEQ ID NO: 1406 - protein, 24 aa, synthetic construct
  REGION 1..24: note = Synthetic
AKDGPLCSSGGSCYSFYHYFYMDV

SEQ ID NO: 1407 - protein, 112 aa, synthetic construct
  REGION 1..112: note = Synthetic
QSVLTQPASVSGSPGQSITISCTGTSSDVGSYDLVSWYQQHPGKAPKLMIYDVSKRPSGVSNRFSGSKSGNTASLTISGLQAEDEADYYCCSYAGSSTSYVVFGGGTKLTVL

SEQ ID NO: 1408 - protein, 12 aa, synthetic construct
  REGION 1..12: note = Synthetic
CSYAGSSTSYVV

SEQ ID NO: 1409 - protein, 121 aa, synthetic construct; identical to SEQ ID NO: 243
  REGION 1..121: note = Synthetic

SEQ ID NO: 1410 - protein, 14 aa, synthetic construct
  REGION 1..14: note = Synthetic
AAAPPRGRPGWFDP

SEQ ID NO: 1411 - protein, 112 aa, synthetic construct
  REGION 1..112: note = Synthetic
QSVLTQPASVSGSPGQSITISCTGTSSDVGGYNCVSWYQQHPGKAPKLVIYDVSNRPSGVSNRFSGSKSGNTASLTISGLQAEDEADYYCSSYTNSSTRGVVFGGGTKLTVL

SEQ ID NO: 1412 - protein, 12 aa, synthetic construct
  REGION 1..12: note = Synthetic
SSYTNSSTRGVV

SEQ ID NO: 1413 - protein, 117 aa, synthetic construct
  REGION 1..117: note = Synthetic
EVQLLESGGGLVQPGGSLRLSCAASGFTFSSYAMSWVRQAPGKGLEWVSAIGGSGDSTYYADSVKGRFSISRDHSKNTLYLQLNSLRAEDTAVYYCAKDQGGYLAYWGQGTLVTVSS

SEQ ID NO: 1414 - protein, 10 aa, synthetic construct
  REGION 1..10: note = Synthetic
AKDQGGYLAY

SEQ ID NO: 1415 - protein, 107 aa, synthetic construct
  REGION 1..107: note = Synthetic
SYVLTQPPSVSVSPGQTASITCSGDKLGDKYACWYQQKPGQSPVLVIYQDSKRPSGIPERFSGSNSGNTATLTISGTQAMDEADYYCQAWDSSTNYVFGTGTKVTVL

SEQ ID NO: 1416 - protein, 10 aa, synthetic construct
  REGION 1..10: note = Synthetic
QAWDSSTNYV

SEQ ID NO: 1417 - protein, 125 aa, synthetic construct; identical to SEQ ID NO: 227
  REGION 1..125: note = Synthetic

SEQ ID NO: 1418 - protein, 18 aa, synthetic construct
  REGION 1..18: note = Synthetic
SRDPPSPTNYYYYYYMDV

SEQ ID NO: 1419 - protein, 112 aa, synthetic construct
  REGION 1..112: note = Synthetic
QSVLTQPASVSGSPGQSITMSCTGTSSDVGSYNLVSWYQQHPGKAPKLMIYDVSKRPSGVSIRFSGSKSGNTASLTISGLQAEDEADYYCCSYAGITTFPYVFGTGTKVTVL

SEQ ID NO: 1420 - protein, 12 aa, synthetic construct
  REGION 1..12: note = Synthetic
CSYAGITTFPYV

SEQ ID NO: 1421 - protein, 123 aa, synthetic construct
  REGION 1..123: note = Synthetic
QVQLQESGPGLVKPSQTLSLTCTVSGGSISSGGYDWSWIRQHPGKGLEWIGYIYYTGSTYYNPSLKSRVTISVDTSKNQFSLKLSSVTAADTAVYYCARGAWDLLFLRAFDMWGLGTTVTVSS

SEQ ID NO: 1422 - protein, 15 aa, synthetic construct
  REGION 1..15: note = Synthetic
ARGAWDLLFLRAFDM

SEQ ID NO: 1423 - protein, 111 aa, synthetic construct
  REGION 1..111: note = Synthetic
QSVLTQPASVSGSPGQSITISCIGTSSDVGAYNYVSWYQQHPGKAPKLMIYEVSNRPSGVSNRFSGSKSDNTASLTISGLQAEDEADYYCSSYAGNTTPYVFGTGTKVTVL

SEQ ID NO: 1424 - protein, 11 aa, synthetic construct
  REGION 1..11: note = Synthetic
SSYAGNTTPYV

SEQ ID NO: 1425 - protein, 123 aa, synthetic construct
  REGION 1..123: note = Synthetic
QVQLVQSGAEVKKPGASMKVSCKVSGYTLVELSIHWVRQAPGKGLEWMGGFDPEDAETIYAQKFQGRVTMTEDTPTDTAYMEVSRLTSEDTAVYYCVVIPAAPEYRYYAMDVWGQGTTVTVSS

SEQ ID NO: 1426 - protein, 16 aa, synthetic construct
  REGION 1..16: note = Synthetic
VVIPAAPEYRYYAMDV

SEQ ID NO: 1427 - protein, 111 aa, synthetic construct
  REGION 1..111: note = Synthetic
QSVLTQPASVSGSPGQSITISCTGTSSDVGSYNLVSWYQQHPAKAPKLMIYDVSKRPSGVSNRFSGSKSGNTASLTISGLQAEDEADYYCCSYARSSSSYVFGTGTKVTVL

SEQ ID NO: 1428 - protein, 11 aa, synthetic construct
  REGION 1..11: note = Synthetic
CSYARSSSSYV

SEQ ID NO: 1429 - protein, 125 aa, synthetic construct
  REGION 1..125: note = Synthetic
EVQLVQSGAEVKKPGESLRISCQISGYSFTTYWISWVRQMPGKGLEWMGRIDPSDSYTNYKPSFQGHVTISVDKSTSTAYLQWSSLKASDTALYYCARHAVYCNNGVCSFWFDRWGQGTLVTVSS

SEQ ID NO: 1430 - protein, 18 aa, synthetic construct
  REGION 1..18: note = Synthetic
ARHAVYCNNGVCSFWFDR

SEQ ID NO: 1431 - protein, 106 aa, synthetic construct
  REGION 1..106: note = Synthetic
SYVLTQPPSVSVSPGQTASITCSGDELGDRYTCWYQQKPGQSPVLVIYQDIKRPSGIPERFSGSNSGNTATLTISGTQGMDEADYYCQAWDSSTGVFGGGTKLTVL

SEQ ID NO: 1432 - protein, 9 aa, synthetic construct
  REGION 1..9: note = Synthetic
QAWDSSTGV

SEQ ID NO: 1433 - protein, 124 aa, synthetic construct
  REGION 1..124: note = Synthetic
QVQLVQSGAEVKKPGASVKVSCKVSVYTLTELSMHWVRQAPGKGLEWMGGFDPEDAETIYAQKFQGRVTMTEDTSTDTAYMELSSLRSEDTAVYYCAAGGPVCPNCHISWFDPWGQGTLVTVSS

SEQ ID NO: 1434 - protein, 17 aa, synthetic construct
  REGION 1..17: note = Synthetic
AAGGPVCPNCHISWFDP

SEQ ID NO: 1435 - protein, 112 aa, synthetic construct
  REGION 1..112: note = Synthetic
QSVLTQPPSVSAAPGQKVTISCSGSRSNIGNNYVSWYQQLPGTAPKLLIYENNKRPSGIPDRFSGSKSGTSATLGITGLQTGDEADYYCGTWDSSLNAFDVVFGGGTKLTVL

SEQ ID NO: 1436 - protein, 13 aa, synthetic construct
  REGION 1..13: note = Synthetic
GTWDSSLNAFDVV

SEQ ID NO: 1437 - protein, 119 aa, synthetic construct
  REGION 1..119: note = Synthetic
QVQLQESGPGLVKPSETLSLTCNVSGFSISIGYYWGWVRQSPGKGLEWIGSVYRIGSTYYNPSVKSRVTILIDTSKNQFSLNLRSVTAADTAVYFCAGAPAIGALIEHWGQGTLVTVSS

SEQ ID NO: 1438 - protein, 12 aa, synthetic construct
  REGION 1..12: note = Synthetic
AGAPAIGALIEH

SEQ ID NO: 1439 - protein, 112 aa, synthetic construct
  REGION 1..112: note = Synthetic
NFMLTQPHSVSESPGKTVTISCTGSSGSVASNYVQWYQQRPGSAPTIVIYEDNQRPSGVPDRFSGSIDSSSNSAFLTISGLKTEDEADYYCQSYDSSNQNVVFGGGTKLTVL

SEQ ID NO: 1440 - protein, 11 aa, synthetic construct
  REGION 1..11: note = Synthetic
QSYDSSNQNVV

SEQ ID NO: 1441 - protein, 123 aa, synthetic construct
  REGION 1..123: note = Synthetic
EVQLVESGGGLVQPGGSLRLSCAASGFTFSRYSMKWVPPAPGKGLEWVSFISNSNFIIYYADSVKGRFTISRDNAKNSLYLQMNSLRAEDTAVYYCARDWCGSTSCHYYMDVWGKGTTVTVSS

SEQ ID NO: 1442 - protein, 16 aa, synthetic construct
  REGION 1..16: note = Synthetic
ARDWCGSTSCHYYMDV

SEQ ID NO: 1443 - protein, 111 aa, synthetic construct
  REGION 1..111: note = Synthetic
QSVLTQPASVSGSPGQSITISCTGTSSDVGGYNYVSWYQQHPGKAPKLMIYEVSNRPSGASNRFSGSKSGNTASLTISGLQAEDEADYYCSSYTSSSTLEVFGTGTKVTVL

SEQ ID NO: 1444 - protein, 11 aa, synthetic construct
  REGION 1..11: note = Synthetic
SSYTSSSTLEV

SEQ ID NO: 1445 - protein, 124 aa, synthetic construct
  REGION 1..124: note = Synthetic
QVQLVESGGGVVQPGRSLRLSCAASGFTLTNYAIHWVRQAPGKGLEWVAAIWYEGNKKSYADFVKGRFTISRDISKNTLYLQMNSLRAEDTALYYCTRAEGEGIYYFYYGLDVWGQGTTVTVSS

SEQ ID NO: 1446 - protein, 17 aa, synthetic construct
  REGION 1..17: note = Synthetic
TRAEGEGIYYFYYGLDV

SEQ ID NO: 1447 - protein, 109 aa, synthetic construct
  REGION 1..109: note = Synthetic
SYVLTQPPSVSVSPGQTARITCSGDALPKQYAYWYQQKAGQAPILLIYKDSERPSGIPERFSGSTSGTTVTLTISGVQAEDEADYYCQSVDSDVTSYVVFGGGTKLTVL

SEQ ID NO: 1448 - protein, 12 aa, synthetic construct
  REGION 1..12: note = Synthetic
QSVDSDVTSYVV

SEQ ID NO: 1449 - protein, 128 aa, synthetic construct
  REGION 1..128: note = Synthetic
QLQLQESGPGLVKPSETLSLSCTVSGGSISSSRYYWVWIRQPPGKGLEWIGSIFYSGSTYYNSSLKSRVTISVDTSKNQFSLKLSSVTAADTAVYYCARGPEYYDFWSGYYRSWFDPWGQGTLVTVSS

SEQ ID NO: 1450 - protein, 20 aa, synthetic construct
  REGION 1..20: note = Synthetic
ARGPEYYDFWSGYYRSWFDP

SEQ ID NO: 1451 - protein, 109 aa, synthetic construct
  REGION 1..109: note = Synthetic
QSVLTQPPSASGTPGQRVTISCSGSSSNIGNNTVNWYQQLPGTAPKLLIYFNNQRPSGAPDRFSGSKSGTSASLAISGLQSEDEADYYCAAWDDSLSHVAFGGGTKLTV

SEQ ID NO: 1452 - protein, 11 aa, synthetic construct
  REGION 1..11: note = Synthetic
AAWDDSLSHVA

SEQ ID NO: 1453 - protein, 120 aa, synthetic construct
  REGION 1..120: note = Synthetic
QVQLQESGPGLVKPSGTLSLTCAVSGGSISSSNWWSWVRQPPGKGLEWIGEIYHSGNTNYSPSLKSRVTISLDKSKSHFSLNVSSVTAADTAVYYCARAWGAGSYWFDPWGQGTLVTVSS

SEQ ID NO: 1454 - protein, 13 aa, synthetic construct
  REGION 1..13: note = Synthetic
ARAWGAGSYWFDP

SEQ ID NO: 1455 - protein, 110 aa, synthetic construct
  REGION 1..110: note = Synthetic
QSVLTQPASVSGSPGQSITISCTGTSSDVGSYNLVSWYQQHPGKAPKLIIYDVIKRPSGVSNRFSGSKSGNTASLTISGLQAEDEADYYCCSYVGSSTWMFGGGTKLTVL

SEQ ID NO: 1456 - protein, 10 aa, synthetic construct
  REGION 1..10: note = Synthetic
CSYVGSSTWM

SEQ ID NO: 1457 - protein, 121 aa, synthetic construct
  REGION 1..121: note = Synthetic
QVQLVQSGAEVKKPGTSVKLSCKVSGYMLVELSIHWVRQAPGKGLEWMGGFDPEDAKTVYAQKFHDRVTMTEDTSTDTAYMELGSLRSEDTAVYYCATGFAYNSGYSLWYWGQGTLVTVSS

SEQ ID NO: 1458 - protein, 14 aa, synthetic construct
  REGION 1..14: note = Synthetic
ATGFAYNSGYSLWY

SEQ ID NO: 1459 - protein, 110 aa, synthetic construct
  REGION 1..110: note = Synthetic
QSVLTQPPSVSAAPGQKVTISCSGSSSNIGNNSVSWYQQPPGTAPKVLIYENDKRPSAIPDRFSGSKSGTSATLGITGLQTGDEADYYCGTWDSSLSENVFGTGTKVTVL

SEQ ID NO: 1460 - protein, 11 aa, synthetic construct
  REGION 1..11: note = Synthetic
GTWDSSLSENV

SEQ ID NO: 1461 - protein, 125 aa, synthetic construct
  REGION 1..125: note = Synthetic
EVQLLESGGGLVQPGESLRLSCAASGFTFTNYAMGWVRQGPGKGLEWVSVISGGGGDTYYADSVKGRFTISRDNSKNTLYLQMNSLRAEDTAIYFCTKGERITMLVVVTLGFDYWGQGALVTVSS

SEQ ID NO: 1462 - protein, 18 aa, synthetic construct
  REGION 1..18: note = Synthetic
TKGERITMLVVVTLGFDY

SEQ ID NO: 1463 - protein, 109 aa, synthetic construct
  REGION 1..109: note = Synthetic
QSVLTQPPSVSAAPGQKVTISCSGSSSNIGNNYVSWYQQLPGTAPKLLIYENYKRPSGIPDRFSGSKSGTSATLGITGLQTGDEADYYCGTWDSSLSAVVFGGGTKLTV

SEQ ID NO: 1464 - protein, 11 aa, synthetic construct
  REGION 1..11: note = Synthetic
GTWDSSLSAVV

SEQ ID NO: 1465 - protein, 124 aa, synthetic construct
  REGION 1..124: note = Synthetic
QVQLVQSGAEVKKPGASVKVSCKVSGYTLVELSMHWVRQAPGKGLEWMGGFDPEDVKTIYAQKFRGRVTMTEDTSTDTAYMELTSLRSEDTAVYYCATAFAVRLDPGDYYFDSWGQGTLVTVSS

SEQ ID NO: 1466 - protein, 17 aa, synthetic construct
  REGION 1..17: note = Synthetic
ATAFAVRLDPGDYYFDS

SEQ ID NO: 1467 - protein, 106 aa, synthetic construct
  REGION 1..106: note = Synthetic
SYVLTQPLSVSVALGQTARISCGGNNIGSKNVHWCQQKPGQAPVLVIYRDTNRPSGIPERFSGSNSGNTATLTISRAQAGDEADYYCQVWDSSSVVFGGGTKLTVL

SEQ ID NO: 1468 - protein, 9 aa, synthetic construct
  REGION 1..9: note = Synthetic
QVWDSSSVV

SEQ ID NO: 1469 - protein, 121 aa, synthetic construct
  REGION 1..121: note = Synthetic
EVQLVESGGVVVQPGGSLRLSCAASGFTFDYHAMHWVRQAPGKGLEWVSLISWDGTNTYYADSVKGRFTISRDNSKNSLYLQMNSLRGEDTALYYCARGEGAAGYSFPDYWGQGTVVTVFS

SEQ ID NO: 1470 - protein, 14 aa, synthetic construct
  REGION 1..14: note = Synthetic
ARGEGAAGYSFPDY

SEQ ID NO: 1471 - protein, 109 aa, synthetic construct; identical to SEQ ID NO: 232
  REGION 1..109: note = Synthetic

SEQ ID NO: 1472 - protein, 11 aa, synthetic construct
  REGION 1..11: note = Synthetic
ASWDDSLRGVV

SEQ ID NO: 1473 - protein, 125 aa, synthetic construct
  REGION 1..125: note = Synthetic
EVQLLESGGGLVQPGGSLRLSCAASGFTFSNYAMNWVRQAPGKGLEWVSAISGTGGSIYYADSVKGRFTVSRDNSKNTLYLQMNSLRAEDTAVYYCAKDGGVLLWFGESYSFDYWGQGTLVTVSS

SEQ ID NO: 1474 - protein, 18 aa, synthetic construct
  REGION 1..18: note = Synthetic
AKDGGVLLWFGESYSFDY

SEQ ID NO: 1475 - protein, 112 aa, synthetic construct
  REGION 1..112: note = Synthetic
QSVLTQPASVSGSPGQSITISCTGTSSNVGSYNLVSWYQQHPGKAPKLMIYDVTKRPSGVSNRFSGSKSDNTASLTISGLQAEDEADYYCCSYGGSTTRPVIFGGGTKLTVL

SEQ ID NO: 1476 - protein, 12 aa, synthetic construct
  REGION 1..12: note = Synthetic
CSYGGSTTRPVI

SEQ ID NO: 1477 - protein, 122 aa, synthetic construct
  REGION 1..122: note = Synthetic
EVQLLESGGGLVQPGGSLRLSCVASGFTFSNYAMSWVRQAPGKGLEWVSSFGGSGGYTYSAGSVKGRFTISRDNSKNTLYLQMTSLSVEDTAIYYCARGVHRAPPIGYFDYWGQGALVTVSS

SEQ ID NO: 1478 - protein, 15 aa, synthetic construct
  REGION 1..15: note = Synthetic
ARGVHRAPPIGYFDY

SEQ ID NO: 1479 - protein, 110 aa, synthetic construct
  REGION 1..110: note = Synthetic
QSVLTQPPSASGTPGQRVTISCSGSSSNIGRNPVNWYQQLPGTAPKVLIYNDNQRPSGVPDRFSGSKSGTSASLAISGLQSEDEADYYCAAWDDRLNGRVFGTGTKVTVL

SEQ ID NO: 1480 - protein, 11 aa, synthetic construct
  REGION 1..11: note = Synthetic
AAWDDRLNGRV

SEQ ID NO: 1481 - protein, 122 aa, synthetic construct
  REGION 1..122: note = Synthetic
QVQLQESGPGLVKPSGTLSLTCAVSGGSISSTNWWSWVRQPPEKGLEWIGEIYPSGNTNYSPSLQSRVTISVDKSKNQFSLNLSSVAAADTAVYYCARGPLRSGGDWFFDDWGQGVLVTVSS

SEQ ID NO: 1482 - protein, 15 aa, synthetic construct
  REGION 1..15: note = Synthetic
ARGPLRSGGDWFFDD

SEQ ID NO: 1483 - protein, 110 aa, synthetic construct
  REGION 1..110: note = Synthetic
QSVLTQPASVSGSPGQSITISCSGTSSDIGSYNLVSWYQQHPGKPPKVMIYAVTKRPAGVSNRFSGSKSGNTASLTISGLQAEDEAVYYCCSYAGSSTSVFGGGTQLTVL

SEQ ID NO: 1484 - protein, 10 aa, synthetic construct
  REGION 1..10: note = Synthetic
CSYAGSSTSV

SEQ ID NO: 1485 - protein, 122 aa, synthetic construct
  REGION 1..122: note = Synthetic
QVQLVESGGGVVQPGRSLRLSCVSSGLAFSTYAMYWVRQAPGKGLEWVAVIWYDGSREYYADSVKGRFSISRDNSKNTLYLQMNSLSAEDTAAYFCAGGSGGGIEDYGMDVWGHGTTVTVSS

SEQ ID NO: 1486 - protein, 15 aa, synthetic construct
  REGION 1..15: note = Synthetic
AGGSGGGIEDYGMDV

SEQ ID NO: 1487 - protein, 107 aa, synthetic construct
  REGION 1..107: note = Synthetic
SYVLTQPPSVSVSPGQTARITCSGDGLSKQYAFWYQQKPGQAPVLVIYKDSERPSGIPERFSGSSSGTTVTLIISGVQAEDEADYYCQSTDNSGTSVVFGGGTKLTX

SEQ ID NO: 1488 - protein, 11 aa, synthetic construct
  REGION 1..11: note = Synthetic
QSTDNSGTSVV

SEQ ID NO: 1489 - protein, 124 aa, synthetic construct; identical to SEQ ID NO: 215
  REGION 1..124: note = Synthetic

SEQ ID NO: 1490 - protein, 17 aa, synthetic construct
  REGION 1..17: note = Synthetic
ATGGPVCSTCYISWFDP

SEQ ID NO: 1491 - protein, 112 aa, synthetic construct; identical to SEQ ID NO: 216
  REGION 1..112: note = Synthetic

SEQ ID NO: 1492 - protein, 13 aa, synthetic construct
  REGION 1..13: note = Synthetic
GTWDSSLSAFDVI

SEQ ID NO: 1493 - protein, 122 aa, synthetic construct
  REGION 1..122: note = Synthetic
QVQLVQSGAEVKKPGASVKVSCKAYGFTFTSYGVTWVRQAPGQGLEWMAWISAYNGNTKYAQKFQGRVTLTTDTSTSIANMELRSLRADDTAVYYCARGGAQWLAYAAFDLWGQGTMVAVSS

SEQ ID NO: 1494 - protein, 15 aa, synthetic construct
  REGION 1..15: note = Synthetic
ARGGAQWLAYAAFDL

SEQ ID NO: 1495 - protein, 111 aa, synthetic construct
  REGION 1..111: note = Synthetic
QSVLTQPPSASGTPGQRVTISCSGSSSNIGSNYVYWYQHLPGTAPKLLIYRNNHRPSGVPDRFSGSKSGTSASLAISGLRSEDEADYYCAAWDDSLSVFYVFGTGTKVTVL

SEQ ID NO: 1496 - protein, 12 aa, synthetic construct
  REGION 1..12: note = Synthetic
AAWDDSLSVFYV

SEQ ID NO: 1497 - protein, 125 aa, synthetic construct
  REGION 1..125: note = Synthetic
EVQLLESGGGLVQPGGSLRLSCAASGFTFSSYVMSWVRQAPGKGLEWVSAIGGSGGSIYYADSAKGRFTISRDNSKKTLYLQMNSLRAEDTAVYYCAKEGDSSNWYYYYYYMDVWGKGTTVTVSS

SEQ ID NO: 1498 - protein, 18 aa, synthetic construct
  REGION 1..18: note = Synthetic
AKEGDSSNWYYYYYYMDV

SEQ ID NO: 1499 - protein, 112 aa, synthetic construct
  REGION 1..112: note = Synthetic
QSVLTQPASVSGSPGQSITISCTGTSSDVGNYNLVSWYQQHPGKAPKLMIYDVNKRPSGISNRFSGSKSGNTASLTISGLQAEDEADYYCCSYAGTDIFYVVFGGGTKLTVV

SEQ ID NO: 1500 - protein, 12 aa, synthetic construct
  REGION 1..12: note = Synthetic
CSYAGTDIFYVV

SEQ ID NO: 1501 - protein, 125 aa, synthetic construct
  REGION 1..125: note = Synthetic
EVQLLESGGGLVQPGGSLRLSCAASGFTFNTYVMSWVRQAPGKGLEWVSTISGSGGSIYYADAVKGRFIISRDNSKNTLYLQMNNLRAEDTALYYCAREGDSSTWYYYHYYMDVWGKGTTVTVSS

SEQ ID NO: 1502 - protein, 18 aa, synthetic construct
  REGION 1..18: note = Synthetic
AREGDSSTWYYYHYYMDV

SEQ ID NO: 1503 - protein, 111 aa, synthetic construct
  REGION 1..111: note = Synthetic
QSVLTQPASVSGSPGQSITISCTGSSSDVGSYNLVSWYQQHPDKAPKVIIYDVTKRPSGVSSRFSGSKSGNTASLTISGLQADDEADYYCCSYAGSNTLYVIFGGGTKLTX

SEQ ID NO: 1504 - protein, 12 aa, synthetic construct
  REGION 1..12: note = Synthetic
CSYAGSNTLYVI

SEQ ID NO: 1505 - protein, 125 aa, synthetic construct
  REGION 1..125: note = Synthetic
EVQLVESGGGLVKPGGSLRLSCAASGFTFSSYNMNWVRQAPGKGLEWVSFISNSGSSIYYADAVKGRFTVSRDNAKNSLFLQMNSLRAEDTAVYYCARDPPSPTNYYYYYYMDVWGKGTTVTVSS

SEQ ID NO: 1506 - protein, 18 aa, synthetic construct
  REGION 1..18: note = Synthetic
ARDPPSPTNYYYYYYMDV

SEQ ID NO: 1507 - protein, 112 aa, synthetic construct
  REGION 1..112: note = Synthetic
QSVLTQPASVSGSPGQSITISCTGTSSDVGSYNLVSWYQQHPGKAPKLMIYDVNKRPSGISNRFSGSKSGNTASLTISGLQAEDEADYYCCSYAGSTTFPYVFGTGTKVTVL

SEQ ID NO: 1508 - protein, 12 aa, synthetic construct
  REGION 1..12: note = Synthetic
CSYAGSTTFPYV

SEQ ID NO: 1509 - protein, 124 aa, synthetic construct
  REGION 1..124: note = Synthetic
QVQLQESGPGLVKPSETLSLTCTVSGGSISGYHWNWIRQTPGKGLEWIGCIYYAGSAIYNPSLKSRLTISVDTSKSQISLKLSSVTAADTAVYYCAREGSSAWLRPASGWFDPWGQGTLVTVSS

SEQ ID NO: 1510 - protein, 18 aa, synthetic construct
  REGION 1..18: note = Synthetic
AREGSSAWLRPASGWFDP

SEQ ID NO: 1511 - protein, 109 aa, synthetic construct
  REGION 1..109: note = Synthetic
SYVLTQPPSVSVAPGQTARITCGGNNIGSKSVHWYQQKPGQAPVVVVYDNSDRPSGIPERFSGSNSKNTATLTISGVEAGDEADYYCQVWDSSSDHPGVFGTGTKVTVL

SEQ ID NO: 1512 - protein, 12 aa, synthetic construct
  REGION 1..12: note = Synthetic
QVWDSSSDHPGV

SEQ ID NO: 1513 - protein, 125 aa, synthetic construct
  REGION 1..125: note = Synthetic
EVQLVESGGGLAQPGGSLSLSCAASGFTLSNYNMNWVRQAPGKGLEWVSFISSSSSAIYYADSVKGRFTISRDNSKNSLYLQMNSLRAEDTAIYYCARDPPGGAPYYYYYYMDVWGKGTTVTVSS

SEQ ID NO: 1514 - protein, 18 aa, synthetic construct
  REGION 1..18: note = Synthetic
ARDPPGGAPYYYYYYMDV

SEQ ID NO: 1515 - protein, 112 aa, synthetic construct
  REGION 1..112: note = Synthetic
QSVLTQPASVSGSPGQSITISCTGTSSDVGSYNLVSWYQQHPGKAPKLMIYDVSKRPSGVSNRFSGSKSGNTASLTISGLQAGDEADYYCCSYAGRTTSPYVFGTGTKVTVL

SEQ ID NO: 1516 - protein, 12 aa, synthetic construct
  REGION 1..12: note = Synthetic
CSYAGRTTSPYV

SEQ ID NO: 1517 - protein, 125 aa, synthetic construct
  REGION 1..125: note = Synthetic
QVQLVQSGAEVKKPGASLKVSCKASGYTFTSYYMHWVRQAPGQGLEWMGTINPSGGSTSYAQKFQGRVTVTRDTSTSTVDMELSGLRSEDTAVYYCARDQTGTTGLDYYYGLDVWGQGTTVTVSS

SEQ ID NO: 1518 - protein, 18 aa, synthetic construct
  REGION 1..18: note = Synthetic
ARDQTGTTGLDYYYGLDV

SEQ ID NO: 1519 - protein, 108 aa, synthetic construct
  REGION 1..108: note = Synthetic
SYELTQPPSVSVSPGQTARITCSGDALPKQFAHWYQQKPGQAPVVVIYKDSERPSGIPERFSGSSSGTTVTLTISGVQAEDEGDYHCQSADSSGTYLVFGGGTKLSVL

SEQ ID NO: 1520 - protein, 11 aa, synthetic construct
  REGION 1..11: note = Synthetic
QSADSSGTYLV

SEQ ID NO: 1521 - protein, 126 aa, synthetic construct
  REGION 1..126: note = Synthetic
QVQLVQSGGEVKKPGASVKVSCKASGYIFTRFGISWVRQAPGQGLQWMGWISAHNGNTNYAQNLQGRVTMTTDTSTNTAYMELRSLRFDDTAVYYCARDLSSPPPFYYYYYGLDVWGQGTAVAVSS

SEQ ID NO: 1522 - protein, 19 aa, synthetic construct
  REGION 1..19: note = Synthetic
ARDLSSPPPFYYYYYGLDV

SEQ ID NO: 1523 - protein, 112 aa, synthetic construct
  REGION 1..112: note = Synthetic
QSVLTQPPSVSAAPGQKVTVSCSGSSSNIGNNYVSWYQQLPGTAPKLLIYENNKRPSGIPDRFSGSKSGTSATLGITGLQTGDEADYYCGTWDSSLITGGVVFGGGTKLTVL

SEQ ID NO: 1524 - protein, 13 aa, synthetic construct
  REGION 1..13: note = Synthetic
GTWDSSLITGGVV

SEQ ID NO: 1525 - protein, 125 aa, synthetic construct
  REGION 1..125: note = Synthetic
QVQLVESGGGVVQPGRSLRLSCAASGFTFSRFGMHWVRQAPGKGLEWVAVISYDGNKKHYADSVKGRFTISRDSSKNTLYLQMSSLRTEDTAVYYCAKDLDHDFWSGYYPGFDYWGQGTLVTVSS

SEQ ID NO: 1526 - protein, 18 aa, synthetic construct
  REGION 1..18: note = Synthetic
AKDLDHDFWSGYYPGFDY

SEQ ID NO: 1527 - protein, 107 aa, synthetic construct
  REGION 1..107: note = Synthetic
SYVLTQPPSVSVSPGQTARITCSGDALPNQYAYWYQQKPGQAPLLVIYKDNERPSGIPERFSGSSSGTTVTLTISGVQAEDEADYYCQSADNSGTYVFGAGTEVTVL

SEQ ID NO: 1528 - protein, 10 aa, synthetic construct
  REGION 1..10: note = Synthetic
QSADNSGTYV

SEQ ID NO: 1529 - protein, 123 aa, synthetic construct; identical to SEQ ID NO: 247
  REGION 1..123: note = Synthetic

SEQ ID NO: 1530 - protein, 16 aa, synthetic construct
  REGION 1..16: note = Synthetic
ARDPWVPGVLYHWFDP

SEQ ID NO: 1531 - protein, 109 aa, synthetic construct
  REGION 1..109: note = Synthetic
SYVLTQPPSVSVAPGQTARITCGGSNIGGKTVHWYQQKAGQAPVLVVDDDSDRPSGIPERFSGSNSGNTATLTISRVEAGDEADYYCQVWDSSSDHLYVFGTGTKVTVL

SEQ ID NO: 1532 - protein, 12 aa, synthetic construct
  REGION 1..12: note = Synthetic
QVWDSSSDHLYV

SEQ ID NO: 1533 - protein, 121 aa, synthetic construct
  REGION 1..121: note = Synthetic
EVQLVESGGGLVKPGGSLRLSCAASGFTFSSDSMXWVRQAPGKGLEWVSSISRSSNSIYYADSVKGRFTISRDNAKNSLYLQMHSLRAEDTAIYYCARSRPGLYGYSMDVWGQGTTVTVSS

SEQ ID NO: 1534 - protein, 14 aa, synthetic construct
  REGION 1..14: note = Synthetic
ARSRPGLYGYSMDV

SEQ ID NO: 1535 - protein, 107 aa, synthetic construct
  REGION 1..107: note = Synthetic
DIQMTQSPXXLSASVGDRVTITCRASQSISSWLAWYQQKPGKAPKLLIYKASSLESGVPSRFSGSGSGTDFTLTISSLQPDDFATYYCQQYYSSLYTFGQGTKLEIK

SEQ ID NO: 1536 - protein, 9 aa, synthetic construct
  REGION 1..9: note = Synthetic
QQYYSSLYT

SEQ ID NO: 1537 - protein, 117 aa, synthetic construct
  REGION 1..117: note = Synthetic
QVQLQESGPGLVKPSGTLSLTCAISGGSISGTHWWSWVRQPPGQGLEWIGEIYHSGATNYNPSLRSRVSLSIDKSKNQFSLILTSVTAADTAIYYCARDVVGSTTDWGQGTLVTVSS

SEQ ID NO: 1538 - protein, 10 aa, synthetic construct
  REGION 1..10: note = Synthetic
ARDVVGSTTD

SEQ ID NO: 1539 - protein, 111 aa, synthetic construct
  REGION 1..111: note = Synthetic
DIVMTQSPLSLPVXPGEPASISCRSSQSLLHSNGINYLVWYLQKPGQSPQLLIYSGSNRASGVPDRFSGSGSGTDFTLKISRVEADDAGVYYCMQALQTITFGQGTRLEIK

SEQ ID NO: 1540 - protein, 8 aa, synthetic construct
  REGION 1..8: note = Synthetic
MQALQTIT

SEQ ID NO: 1541 - protein, 132 aa, synthetic construct; identical to SEQ ID NO: 201
  REGION 1..132: note = Synthetic

SEQ ID NO: 1542 - protein, 25 aa, synthetic construct
  REGION 1..25: note = Synthetic
ARDSWEVPRYYYYDSTAYQGMVPDF

SEQ ID NO: 1543 - protein, 106 aa, synthetic construct
  REGION 1..106: note = Synthetic
AIQMTQSPSSLSASVGDRVTITCRASQDIRNDLGWYQQKPGKAPKLLIYAASSLQSGVPSRFSGSGSGTEFTLTISTLQPEDFATYYCLQDFNYPRTFGQGTKLEI

SEQ ID NO: 1544 - protein, 9 aa, synthetic construct
  REGION 1..9: note = Synthetic
LQDFNYPRT

SEQ ID NO: 1545 - protein, 122 aa, synthetic construct
  REGION 1..122: note = Synthetic
QVQLVQSGAEVKEPGASVKVSCKASDYTFTNYGISWVRQAPGQGLEWMGWISAYNGNTNYAQKLQGRVTMSTDTSTSTAYMELRSLRSDDTAVYYCVRDLHLISIFGVGDVWGQGTTVTVSS

SEQ ID NO: 1546 - protein, 15 aa, synthetic construct
  REGION 1..15: note = Synthetic
VRDLHLISIFGVGDV

SEQ ID NO: 1547 - protein, 107 aa, synthetic construct
  REGION 1..107: note = Synthetic
DIQMTQSPSSLSASVGDRVTITCRASQSIRSYLNWYQQKPGKAPKLLISAASSLQSGVPSRFSGSGSGTDFTLTISSLQPEDFATYYCQQSYSTPFTFGPGTKVDIK

SEQ ID NO: 1548 - protein, 9 aa, synthetic construct
  REGION 1..9: note = Synthetic
QQSYSTPFT

SEQ ID NO: 1549 - protein, 127 aa, synthetic construct; identical to SEQ ID NO: 203
  REGION 1..127: note = Synthetic

SEQ ID NO: 1550 - protein, 20 aa, synthetic construct
  REGION 1..20: note = Synthetic
ARDPTDDYDLWSGYYYGMDI

SEQ ID NO: 1551 - protein, 107 aa, synthetic construct; identical to SEQ ID NO: 204
  REGION 1..107: note = Synthetic

SEQ ID NO: 1552 - protein, 9 aa, synthetic construct
  REGION 1..9: note = Synthetic
QQRGNWSYT

SEQ ID NO: 1553 - protein, 123 aa, synthetic construct
  REGION 1..123: note = Synthetic
QLQLQESGPGLVKPSETLSLTCTVSGGSISSSSYYWGWIRQPPGKGLEWIGTIFYSGISYNNPSLRSRVTMSVDTSKNQFSLRLRSLTAADTAVYYCARAYRGYDVDEPFDYWGQGILVTVSS

SEQ ID NO: 1554 - protein, 15 aa, synthetic construct
  REGION 1..15: note = Synthetic
ARAYRGYDVDEPFDY

SEQ ID NO: 1555 - protein, 107 aa, synthetic construct; identical to SEQ ID NO: 326
  REGION 1..107: note = Synthetic

SEQ ID NO: 1556 - protein, 9 aa, synthetic construct
  REGION 1..9: note = Synthetic
LQHNSYPLT

SEQ ID NO: 1557 - protein, 128 aa, synthetic construct; identical to SEQ ID NO: 251
  REGION 1..128: note = Synthetic

SEQ ID NO: 1558 - protein, 21 aa, synthetic construct
  REGION 1..21: note = Synthetic
ARDAPQSYSVNSGYYPSPSDS

SEQ ID NO: 1559 - protein, 108 aa, synthetic construct
  REGION 1..108: note = Synthetic
EIVMTQSPATLSVSPGERATLSCRASQSVSSNLAWYQQRPGQAPRLLVYGASTRATGIPVRFSGSGSGTEFTLTISSLQSEDFAVYYCQHYYNWPPYTFGQGTKLEIK

SEQ ID NO: 1560 - protein, 10 aa, synthetic construct
  REGION 1..10: note = Synthetic
QHYYNWPPYT

SEQ ID NO: 1561 - protein, 123 aa, synthetic construct
  REGION 1..123: note = Synthetic
QVQLVQSGAEVKKPGASVKVSCKVSGYTLTELSIDWVRQAPGKGLEWMGGFDPENSDTVYAQKFQGRVTMTEDTSTDTAYMELSSLRSEDTAVYYCLTNYDFWSGHYNGFNYWGQGTLVTVSS

SEQ ID NO: 1562 - protein, 16 aa, synthetic construct
  REGION 1..16: note = Synthetic
LTNYDFWSGHYNGFNY

SEQ ID NO: 1563 - protein, 107 aa, synthetic construct
  REGION 1..107: note = Synthetic
DIQLTQSPSFLSASVGDRVTITCRASQGISSYLAWYQQKPGKAPKLLIYSASSLQSGVPSRFSGSGSGTEFTLTISSLQPEDFATYYCQQLIGFPRTFGQGTKLEIK

SEQ ID NO: 1564 - protein, 9 aa, synthetic construct
  REGION 1..9: note = Synthetic
QQLIGFPRT

SEQ ID NO: 1565 - protein, 128 aa, synthetic construct; identical to SEQ ID NO: 211
  REGION 1..128: note = Synthetic

SEQ ID NO: 1566 - protein, 21 aa, synthetic construct
  REGION 1..21: note = Synthetic
ARVPQAGAARGHFYYYHGLDV

SEQ ID NO: 1567 - protein, 108 aa, synthetic construct
  REGION 1..108: note = Synthetic
EIVLTQSPGTLSLSPGERATLSCRTSQSVSNNYLAWYQQKLGQAPRLLIYGASSRATGIPDRFSGSGSGTDFTLIISRLEPEDFAVYYCQQYGSSPLTFGGGTKLEIK

SEQ ID NO: 1568 - protein, 9 aa, synthetic construct
  REGION 1..9: note = Synthetic
QQYGSSPLT

SEQ ID NO: 1569 - protein, 130 aa, synthetic construct
  REGION 1..130: note = Synthetic
QVQLVESGGGVVQPGKSLRLSCAASEFTFSAYAMHWVRQAPGKGLEWVALISYDGSNEYYADSVKGRFTISRDNSKNTLYLQMNSLRAEDTAVYFCARDMAYGWVDDLLVPDPQFTFDYWGQGTLVTVSS

SEQ ID NO: 1570 - protein, 23 aa, synthetic construct
  REGION 1..23: note = Synthetic
ARDMAYGWVDDLLVPDPQFTFDY

SEQ ID NO: 1571 - protein, 106 aa, synthetic construct
  REGION 1..106: note = Synthetic
DIQMTQSPSSLSASVGDRVTITCRASQDVSNWLAWYQQKPEKAPKSLIYAASSLQSGVPSRFSGSRSGTDFTLTISSLQPEDFATYYCQQYHTYPPTFGQGTKVEI

SEQ ID NO: 1572 - protein, 9 aa, synthetic construct
  REGION 1..9: note = Synthetic
QQYHTYPPT

SEQ ID NO: 1573 - protein, 123 aa, synthetic construct
  REGION 1..123: note = Synthetic
QLQLQESGPGLVKPSETLSLTCTVSGGSISSSNYYWGWIRQPPGKGLEWIGNIFYSGITYSNPSLGSRVTISVDTSKNQFSLKLSSLTAADTAVYYCARDVETTMYLGTLDIWGQGTMVTVSS

SEQ ID NO: 1574 - protein, 15 aa, synthetic construct
  REGION 1..15: note = Synthetic
ARDVETTMYLGTLDI

SEQ ID NO: 1575 - protein, 107 aa, synthetic construct
  REGION 1..107: note = Synthetic
DIQMTQSPSSLSASVGDRVTITCRASQGIRNDLGWYQQKPGKAPKRLIYAASSLQSGVPSRFSGSGSGTEFTLTITSLQPEDFATYYCLQHNSYPQTFGQGTKVEIK

SEQ ID NO: 1576 - protein, 9 aa, synthetic construct
  REGION 1..9: note = Synthetic
LQHNSYPQT

SEQ ID NO: 1577 - protein, 131 aa, synthetic construct
  REGION 1..131: note = Synthetic
EVQLVESGGGLVKPGGSLRLSCAASGFKFNNAWMSWVRQTPGKGLEWVGRIKSAIDAGTTDYSAPVKGRFTISRDDSENTLYLEMNNLKTEDTAVYYCTTAQYQVPKFVWVGDLMNYFDNWGQGALVIVSS

SEQ ID NO: 1578 - protein, 22 aa, synthetic construct
  REGION 1..22: note = Synthetic
TTAQYQVPKFVWVGDLMNYFDN

SEQ ID NO: 1579 - protein, 107 aa, synthetic construct
  REGION 1..107: note = Synthetic
EIVLTQSPGTLSLSPGERATLSCRASQSVSSRYLAWYQQKPGQAPRLLIYGASGRATGVPDRFSGSGSGTDFTLTISRLEPEDFAVYYCQQYDSSPLTFGGGTKVEI

SEQ ID NO: 1580 - protein, 9 aa, synthetic construct
  REGION 1..9: note = Synthetic
QQYDSSPLT

SEQ ID NO: 1581 - protein, 132 aa, synthetic construct
  REGION 1..132: note = Synthetic
QVQLVESGGGVVQPGRSLRLSCAASGFTFRSYAMHWVRQAPGKGLEWVAVISYDGGNKYYADSVRGRFTISRDNSKSTLFLQMGGLSAEDTAVYYCARDAPDPAEPSSEWLRVGEQFYFDSWGQGVLVTVSS

SEQ ID NO: 1582 - protein, 25 aa, synthetic construct
  REGION 1..25: note = Synthetic
ARDAPDPAEPSSEWLRVGEQFYFDS

SEQ ID NO: 1583 - protein, 107 aa, synthetic construct
  REGION 1..107: note = Synthetic
DIQMTQSPSTLSASVGDRVTITCRASQSINNWLAWYQQKPGKAPKLLIYKASSLESGVPSRFSGSGSGTEFTLTISSLQPDDFATYYCQQYNTFSVTFGQGTKVEIK

SEQ ID NO: 1584 - protein, 9 aa, synthetic construct
  REGION 1..9: note = Synthetic
QQYNTFSVT

SEQ ID NO: 1585 - protein, 126 aa, synthetic construct; identical to SEQ ID NO: 235
  REGION 1..126: note = Synthetic

SEQ ID NO: 1586 - protein, 19 aa, synthetic construct
  REGION 1..19: note = Synthetic
ARFLALTYYYDSSGYPFDY

SEQ ID NO: 1587 - protein, 109 aa, synthetic construct; identical to SEQ ID NO: 236
  REGION 1..109: note = Synthetic

SEQ ID NO: 1588 - protein, 11 aa, synthetic construct
  REGION 1..11: note = Synthetic
QQSYSTPRMYT

SEQ ID NO: 1589 - protein, 123 aa, synthetic construct; identical to SEQ ID NO: 213
  REGION 1..123: note = Synthetic

SEQ ID NO: 1590 - protein, 16 aa, synthetic construct
  REGION 1..16: note = Synthetic
AKDKDDGWYFINYFDY

SEQ ID NO: 1591 - protein, 109 aa, synthetic construct; identical to SEQ ID NO: 214
  REGION 1..109: note = Synthetic

SEQ ID NO: 1592 - protein, 10 aa, synthetic construct
  REGION 1..10: note = Synthetic
HHYGTSPGFT

SEQ ID NO: 1593 - protein, 132 aa, synthetic construct
  REGION 1..132: note = Synthetic
QVQLVESGGGVVQPGRSLRLSCAASGFTFSSYGMHWVRQAPGKGLEWVAFIWYDGSNKKYADSVKGRFTISRDNSKNTLYLQMNSLGVEDSAVYYCARDSWEVPRYYYYDTFDYQGMVPDYWGQGTLVTVSS

SEQ ID NO: 1594 - protein, 25 aa, synthetic construct
  REGION 1..25: note = Synthetic
ARDSWEVPRYYYYDTFDYQGMVPDY

SEQ ID NO: 1595 - protein, 107 aa, synthetic construct
  REGION 1..107: note = Synthetic
AIQMTQSPSSLSASIGDRVTITCRASQDIRNDLGWYQQKPGKAPKLLIYAASSLESGVPARFSGNGSGTNFTLTIRSLQPEDFASYFCLQDHNYPRTFGQGTKLETK

SEQ ID NO: 1596 - protein, 9 aa, synthetic construct
  REGION 1..9: note = Synthetic
LQDHNYPRT

SEQ ID NO: 1597 - protein, 129 aa, synthetic construct
  REGION 1..129: note = Synthetic
QVQLQESGPGLVKPSETLSLTCSVSSFPISSGHYWAWIRQPPGKGLEWIGSISHDGSSHYNSGSTYYNPSLKSRVTMSADTSKNHFSLKLNSVTAADTAIYYCARDSSSAYSLPAFDVWGQGTMVTVSS

SEQ ID NO: 1598 - protein, 15 aa, synthetic construct
  REGION 1..15: note = Synthetic
ARDSSSAYSLPAFDV

SEQ ID NO: 1599 - protein, 107 aa, synthetic construct
  REGION 1..107: note = Synthetic
DIQMTQSPSSVSASVGDRVTITCRASQGVNNWLAWYQQKPGKAPKLLIYTASSLQGGVPSRFSGSGSGTDFTLTISSLQPEDFATYYCQQAHSFPYTFGQGTKLEIK

SEQ ID NO: 1600 - protein, 9 aa, synthetic construct
  REGION 1..9: note = Synthetic
QQAHSFPYT

SEQ ID NO: 1601 - protein, 123 aa, synthetic construct
  REGION 1..123: note = Synthetic
QVQLVQSGAEVKKPGASVKVSCKVSGYTLPELSIHWVRQAPGKGLEWMGGFDPEGGETIYAQKFQGRVTMTDDTSTDIAYMELSSLRSEDTAVYYCAAGPAIGPRPVTWLDPWGQGTLVTVSS

SEQ ID NO: 1602 - protein, 16 aa, synthetic construct
  REGION 1..16: note = Synthetic
AAGPAIGPRPVTWLDP

SEQ ID NO: 1603 - protein, 106 aa, synthetic construct
  REGION 1..106: note = Synthetic
DIQMTQSPSTLSASVGDRVTITCRASQSISSWLAWYQQKPGKAPELLIYKASSLESGVPSRFGGSGSGTEFTLTISSLQPDDFATYYCQQYYSYWTFGQGTKVEIK

SEQ ID NO: 1604 - protein, 8 aa, synthetic construct
  REGION 1..8: note = Synthetic
QQYYSYWT

SEQ ID NO: 1605 - protein, 118 aa, synthetic construct
  REGION 1..118: note = Synthetic
EVQLLESGGGLVQPGGSLRLSCAASGFTFSSSALSWVRQAPGKGLEWVSAITSGGGGTQYADSVTGRFTISRDNSKNTLYLQMNSVRAEDTAVYYCAKDLGSWFFDHWGQGTLVTVSS

SEQ ID NO: 1606 - protein, 11 aa, synthetic construct
  REGION 1..11: note = Synthetic
AKDLGSWFFDH

SEQ ID NO: 1607 - protein, 108 aa, synthetic construct
  REGION 1..108: note = Synthetic
DIQMTQSPSSLSASIGDRVTITCRASQGIRNDLGWYQQKPGKAPKRLIYAASSLQSGVPLRFSGSGSGTEFTLTISSLQPEDFATYYCLQYNTYPALTFGGGTKVEIK

SEQ ID NO: 1608 - protein, 10 aa, synthetic construct
  REGION 1..10: note = Synthetic
LQYNTYPALT

SEQ ID NO: 1609 - protein, 127 aa, synthetic construct
  REGION 1..127: note = Synthetic
QVQLVQSGAEVKKPGASVKVSCKVSGYTLPEISIHWVRQAPGKGLEWMGGFDPEDGETIYAQKFQGRVTMTEDTSTDTAYMELSSLRSEDTAVYFCTAGPALYGGNWSPLYNWFDPWGQGTLVTVSS

SEQ ID NO: 1610 - protein, 20 aa, synthetic construct
  REGION 1..20: note = Synthetic
TAGPALYGGNWSPLYNWFDP

SEQ ID NO: 1611 - protein, 107 aa, synthetic construct
  REGION 1..107: note = Synthetic
DIQMTQSPSSLSASVGDRVTVTCRASQNISTYLNWYQQKPGKAPKLLIYAASSLPTGVPSRFSGSGSGTDFTLTINSLQLEDFATYYCQESYRTPALTFGGGTKVDI

SEQ ID NO: 1612 - protein, 10 aa, synthetic construct
  REGION 1..10: note = Synthetic
QESYRTPALT

SEQ ID NO: 1613 - protein, 121 aa, synthetic construct
  REGION 1..121: note = Synthetic
QVQLVQSGAEVKKHGSSVKVSCKASGGSLDNYAISWVRQAPRQGLEWMGGVIPTLGIKNFAQRFQARVTITADKSTSTVYMQLSSLRSEDTAVYYCVRGYGGNLLDAFDIWGQGTMVTVSS

SEQ ID NO: 1614 - protein, 14 aa, synthetic construct
  REGION 1..14: note = Synthetic
VRGYGGNLLDAFDI

SEQ ID NO: 1615 - protein, 107 aa, synthetic construct
  REGION 1..107: note = Synthetic
DIQMTQSPSSLSASVGDRVTITCRASQSISTYLNWYQQKPGKAPKLLIYAASSLQSGVPSRFSGSGSGTDFTLTISSLQPEDFATYCCQQSYSTLVTFGGGTKVEVK

SEQ ID NO: 1616 - protein, 9 aa, synthetic construct
  REGION 1..9: note = Synthetic
QQSYSTLVT

SEQ ID NO: 1617 - protein, 128 aa, synthetic construct
  REGION 1..128: note = Synthetic
QVQLVQSGAEVKKPGASVKVSCRVSGNTLTELSIHWVRQAPGKGLEWMGGFHPEDGETIYAQKVQGRVTMTEDTFTDTAYMELSSLRSEDTAVYYCATDTKVGATKETERSLYAFDIWGQGTMVTVSS

SEQ ID NO: 1618 - protein, 21 aa, synthetic construct
  REGION 1..21: note = Synthetic
ATDTKVGATKETERSLYAFDI

SEQ ID NO: 1619 - protein, 113 aa, synthetic construct
  REGION 1..113: note = Synthetic
DIVMTQSPDSLAVSXGERATINCKSSQSVLYTSNSKNYLAWYQQKPGQPPKLLIYWASTRESGVPDRFSGSGSGTDFTLTISSLQAEDVAVYYCQQYYSTPPCFGGGTKVEIK

SEQ ID NO: 1620 - protein, 9 aa, synthetic construct
  REGION 1..9: note = Synthetic
QQYYSTPPC

SEQ ID NO: 1621 - protein, 121 aa, synthetic construct
  REGION 1..121: note = Synthetic
QVQLVESGGGLVKPRGSLRLSCAASGFTFSDYHMGWIRQAPGKGLEWVSYITNSSPGDTNYADSVKGRFTISRDNAKNSLYLQMNSLRPEDTAVYYCARVHGDYDYYMDVWGKGTTVTVSS

SEQ ID NO: 1622 - protein, 13 aa, synthetic construct
  REGION 1..13: note = Synthetic
ARVHGDYDYYMDV

SEQ ID NO: 1623 - protein, 107 aa, synthetic construct; identical to SEQ ID NO: 200
  REGION 1..107: note = Synthetic

SEQ ID NO: 1624 - protein, 9 aa, synthetic construct
  REGION 1..9: note = Synthetic
QQYSSYSLT

SEQ ID NO: 1625 - protein, 123 aa, synthetic construct
  REGION 1..123: note = Synthetic
QVQLVQSGAEVKKPGASVKVSCKASGYTSTRYGFSWVRQAPGQGLEWMGWISTYNGNTDYAQKFQGRVTMTTDTSTSTAYMELRSLRSDDTAVYYCARVFESSGRRPGWFGPWGQGTLVAVSS

SEQ ID NO: 1626 - protein, 16 aa, synthetic construct
  REGION 1..16: note = Synthetic
ARVFESSGRRPGWFGP

SEQ ID NO: 1627 - protein, 106 aa, synthetic construct
  REGION 1..106: note = Synthetic
DIQMTQSPSSLSASVGDRVTITCRASQGISNSLAWYQQKPGKAPKLLLYAASRLESGVPSRFSGSGSGTDYTLTISSLQPEDFATYYCQQYYSTPSTFGQGTSVEI

SEQ ID NO: 1628 - protein, 9 aa, synthetic construct
  REGION 1..9: note = Synthetic
QQYYSTPST

SEQ ID NO: 1629 - protein, 126 aa, synthetic construct
  REGION 1..126: note = Synthetic
EVQLVESGGGLVKPGGSLRLSCAASKFTFSNYSMNWVRQAPGKGLEWVSSISSSSSYIYFADSVKGRFTISRDNAKKSVYLQMNSLRAEDTAVYYCASAQFNTRWGGYYYYGMDVWGQGTTVTVTS

SEQ ID NO: 1630 - protein, 19 aa, synthetic construct
  REGION 1..19: note = Synthetic
ASAQFNTRWGGYYYYGMDV

SEQ ID NO: 1631 - protein, 108 aa, synthetic construct
  REGION 1..108: note = Synthetic
EIVMTQSPATLSVSPGERATLSCRASQSVSNNLAWYQQKPGQAPRLLIYGASTRATGVPARFSGSGSGTEFTLTISSLQSEDSAVYYCQQCYNWPPWTFGQGTKVEIK

SEQ ID NO: 1632 - protein, 10 aa, synthetic construct
  REGION 1..10: note = Synthetic
QQCYNWPPWT

SEQ ID NO: 1633 - protein, 123 aa, synthetic construct
  REGION 1..123: note = Synthetic
QLQLQESGPGLVKPAETLSLTCTVSGGSISSSNYYWGWIRQPPGKGLEWIGNIFYSGITYYNPSLKGRVSISVDTSKNQFSLKVSSVTVADTAVYYCARDVETTLYLGTLDIWGPGTTVAVSS

SEQ ID NO: 1634 - protein, 15 aa, synthetic construct
  REGION 1..15: note = Synthetic
ARDVETTLYLGTLDI

SEQ ID NO: 1635 - protein, 107 aa, synthetic construct
  REGION 1..107: note = Synthetic
DIQMTQSPVSLSASVGDRVTITCRASQGIRNDLGWYQQKPGKAPKRLIYAASNLQSGVPSRFSGSGSGTEFTLTISSLQPEDFATYFCLQHNSYPQSFGQGTKVEIK

SEQ ID NO: 1636 - protein, 9 aa, synthetic construct
  REGION 1..9: note = Synthetic
LQHNSYPQS

SEQ ID NO: 1637 - protein, 120 aa, synthetic construct; identical to SEQ ID NO: 245
  REGION 1..120: note = Synthetic

SEQ ID NO: 1638 - protein, 13 aa, synthetic construct
  REGION 1..13: note = Synthetic
ARDHGDYDLFFDL

SEQ ID NO: 1639 - protein, 107 aa, synthetic construct
  REGION 1..107: note = Synthetic
DIQMTQSPXTLSASVGDRVTITCRASQSISTWLAWYQQKAGKAPKLLIYKASSLESGVPSRFSGSGSGTEFTLTISGLQPDDFATYYCQQYSTYSQTFGQGTKLEIK

SEQ ID NO: 1640 - protein, 9 aa, synthetic construct
  REGION 1..9: note = Synthetic
QQYSTYSQT

SEQ ID NO: 1641 - protein, 123 aa, synthetic construct
  REGION 1..123: note = Synthetic
EVQLVESGGGLVQPGRSLRLSCAASGFTFDDYAMHWVRQAPGKGLEWVSGISRNSGSIGYADSLKGRFTISRDNAKNSLYLQMNRLRAEDTALYYCAKGVVSVAGTLEALDIWGQGTMVTVSS

SEQ ID NO: 1642 - protein, 16 aa, synthetic construct
  REGION 1..16: note = Synthetic
AKGVVSVAGTLEALDI

SEQ ID NO: 1643 - protein, 106 aa, synthetic construct
  REGION 1..106: note = Synthetic
DIQMTQSPSSLSASVGDRVTITCRASQSISKYLNWYQQKPGKAPKLLIYAASSLESGVPSRFSGSGSGTDFTLTISSLQPEDFATYYCQQSYSTLTFGGGTKVKIK

SEQ ID NO: 1644 - protein, 8 aa, synthetic construct
  REGION 1..8: note = Synthetic
QQSYSTLT

SEQ ID NO: 1645 - protein, 120 aa, synthetic construct; identical to SEQ ID NO: 249
  REGION 1..120: note = Synthetic

SEQ ID NO: 1646 - protein, 13 aa, synthetic construct
  REGION 1..13: note = Synthetic
AKGYSGYDLVFDY

SEQ ID NO: 1647 - protein, 106 aa, synthetic construct; identical to SEQ ID NO: 250
  REGION 1..106: note = Synthetic

SEQ ID NO: 1648 - protein, 8 aa, synthetic construct
  REGION 1..8: note = Synthetic
QQYNGYFT

SEQ ID NO: 1649 - protein, 122 aa, synthetic construct
  REGION 1..122: note = Synthetic
EVQLVESGGAVVQPGGSLRLSCAGSGFTFEDYSMHWVRQAPGRGLEWVSLITWDGGDTYYADSVMGRFTASRDNSKNSLYLQMNSLTTEDTALYYCAKDINAYFEGGYFGSWGQGTLVTVSS

SEQ ID NO: 1650 - protein, 15 aa, synthetic construct
  REGION 1..15: note = Synthetic
AKDINAYFEGGYFGS

SEQ ID NO: 1651 - protein, 107 aa, synthetic construct
  REGION 1..107: note = Synthetic
AIQMTQSPSSLSASVRDRVTITCRASQVIRNNLGWYQQKPGKAPKLLIYAASTLQSGVPSRFSGSGSGTDFTLTISGLQPEDFATYYCLQDYSYPLTFGGGTKVEIK

SEQ ID NO: 1652 - protein, 9 aa, synthetic construct
  REGION 1..9: note = Synthetic
LQDYSYPLT

SEQ ID NO: 1653 - protein, 123 aa, synthetic construct
  REGION 1..123: note = Synthetic
QVQLVESGGGVVQPGRSLRLSCVVSGFTFSDYSMHWVRQAPGKGLEWGALISYDGTTKYYADSVKGRFTISRDNSKNTLYLEMNGLRPEDTAVYYCATPRRALNTAIINLDYWGQGTLVTVSS

SEQ ID NO: 1654 - protein, 16 aa, synthetic construct
  REGION 1..16: note = Synthetic
ATPRRALNTAIINLDY

SEQ ID NO: 1655 - protein, 107 aa, synthetic construct
  REGION 1..107: note = Synthetic
DIQMTQSPXSLSASVGDRVTITCQASQDISTYLNWYQQKPGKAPELLIYDAFNLEIGVPPRFSGSGSGTDFTLTISTLQPEDVATYYCQQYDNLPPGFGQGTRLEIK

SEQ ID NO: 1656 - protein, 9 aa, synthetic construct
  REGION 1..9: note = Synthetic
QQYDNLPPG

SEQ ID NO: 1657 - protein, 124 aa, synthetic construct; identical to SEQ ID NO: 217
  REGION 1..124: note = Synthetic

SEQ ID NO: 1658 - protein, 17 aa, synthetic construct
  REGION 1..17: note = Synthetic
ARDQGYGHYLEYNWFDP

SEQ ID NO: 1659 - protein, 107 aa, synthetic construct
  REGION 1..107: note = Synthetic
DIQLTQSPVSLSASVGDRVTITCRASQVISSYLAWYQQKPGKAPKSLIYAASTLQSGVPSRFSGSGSGTEFTLTISSLQPEDFATYYCQQLHSYPITFGQGTRLDIK

SEQ ID NO: 1660 - protein, 9 aa, synthetic construct
  REGION 1..9: note = Synthetic
QQLHSYPIT

SEQ ID NO: 1661 - protein, 125 aa, synthetic construct
  REGION 1..125: note = Synthetic
QVQLQQWGAGLLKPSETLSLTCAVYGGSFNGYYWTWIRQPPGKGLEWIGEIDHSGSTNYNPSLKSRVTISLDTSKNQFSLRLISVTAADTAVYFCARGPDTYDFWSGYYSGLDPWGQGTLVTVSS

SEQ ID NO: 1662 - protein, 19 aa, synthetic construct
  REGION 1..19: note = Synthetic
ARGPDTYDFWSGYYSGLDP

SEQ ID NO: 1663 - protein, 108 aa, synthetic construct
  REGION 1..108: note = Synthetic
EIVLTQSPATLSLSPGERATLSCRASQSVSSFLAWYQQKPGQAPRLLIYDASNRATGIPARFSGSGSGTDFTLTISSLEPEDFAVYYCQQRSNWPPSTFGQGTKLEIK

SEQ ID NO: 1664 - protein, 10 aa, synthetic construct
  REGION 1..10: note = Synthetic
QQRSNWPPST

SEQ ID NO: 1665 - protein, 125 aa, synthetic construct
  REGION 1..125: note = Synthetic
QVQLVESGGGLVKPGGSLRLSCAASGFTFSDSYMSWIRQAPGKGLEWISYMSSGGSTKYYGDSVKGRFTISRDNAKNSLYLQMISLRAEDTAVYYCARGMLILPTDIAPSYFDSWGQGTLVTVSS

SEQ ID NO: 1666 - protein, 18 aa, synthetic construct
  REGION 1..18: note = Synthetic
ARGMLILPTDIAPSYFDS

SEQ ID NO: 1667 - protein, 107 aa, synthetic construct
  REGION 1..107: note = Synthetic
EIVMTQSPATLSVSPGERATLSCRASQSVSSNLAWYQQKPGQAPRLLIYGASTRATGIPARFSGSGSGTEFTLTISSLQSEDLAVYYCQQYNNWPRTFGQGTKVEIK

SEQ ID NO: 1668 - protein, 9 aa, synthetic construct
  REGION 1..9: note = Synthetic
QQYNNWPRT

SEQ ID NO: 1669 - protein, 131 aa, synthetic construct
  REGION 1..131: note = Synthetic
EVQLVESGGGLVKPGGSLRLSCAASGFNFNKAWMGWVRQAPGKGLEWVGRIKSEIDAGTTDYSAPVKGRFTISRDDSENTLYLEMNSLKVEDTGVYYCTTAQFQVPRFVWVGDLMNYFDNWGQGALVIVSS

SEQ ID NO: 1670 - protein, 22 aa, synthetic construct
  REGION 1..22: note = Synthetic
TTAQFQVPRFVWVGDLMNYFDN

SEQ ID NO: 1671 - protein, 107 aa, synthetic construct
  REGION 1..107: note = Synthetic
EIVLTQSPVSLSLSPGERATLSCRASQSVSSNYLAWYQQKPGQAPRLLIYGASGRATGIPDRFSGSGSGTDFTLTISRLEPEDFAVYYCQQYDNSPLTFGGGTKVEI

SEQ ID NO: 1672 - protein, 9 aa, synthetic construct
  REGION 1..9: note = Synthetic
QQYDNSPLT

SEQ ID NO: 1673 - protein, 126 aa, synthetic construct; identical to SEQ ID NO: 237
  REGION 1..126: note = Synthetic

SEQ ID NO: 1674 - protein, 19 aa, synthetic construct
  REGION 1..19: note = Synthetic
VASRGPAYPSVVVTSQFDF

SEQ ID NO: 1675 - protein, 108 aa, synthetic construct
  REGION 1..108: note = Synthetic
EIVLTQSPXXLSLSPGERATLSCRASQSVSSNYLAWYQQKPGQAPRLLIYGASSRATGIPGRFSGSGSGTDFTLTISRLEPEDFAVYYCQQYGSSPITFGQGTRLEIK

SEQ ID NO: 1676 - protein, 9 aa, synthetic construct
  REGION 1..9: note = Synthetic
QQYGSSPIT

SEQ ID NO: 1677 - protein, 126 aa, synthetic construct; identical to SEQ ID NO: 207
  REGION 1..126: note = Synthetic

SEQ ID NO: 1678 - protein, 19 aa, synthetic construct
  REGION 1..19: note = Synthetic
ASAQSSARWGGYYQYAMDV

SEQ ID NO: 1679 - protein, 107 aa, synthetic construct; identical to SEQ ID NO: 208
  REGION 1..107: note = Synthetic

SEQ ID NO: 1680 - protein, 10 aa, synthetic construct
  REGION 1..10: note = Synthetic
QQYYNWPPWT

SEQ ID NO: 1681 - protein, 121 aa, synthetic construct; identical to SEQ ID NO: 199
  REGION 1..121: note = Synthetic

SEQ ID NO: 1682 - protein, 13 aa, synthetic construct
  REGION 1..13: note = Synthetic
ARVHGDYDYYMDV

SEQ ID NO: 1683 - protein, 107 aa, synthetic construct; identical to SEQ ID NO: 200
  REGION 1..107: note = Synthetic

SEQ ID NO: 1684 - protein, 9 aa, synthetic construct
  REGION 1..9: note = Synthetic
QQYSSYSLT

SEQ ID NO: 1685 - protein, 127 aa, synthetic construct; identical to SEQ ID NO: 253
  REGION 1..127: note = Synthetic

SEQ ID NO: 1686 - protein, 21 aa, synthetic construct
  REGION 1..21: note = Synthetic
TKDAYDYGSKNHFYYYYYMDV

SEQ ID NO: 1687 - protein, 107 aa, synthetic construct
  REGION 1..107: note = Synthetic
EIVLTQSPVTLSLSPGERATLSCRASQSVTSNYLAWYQQKLGQAPRLLIYGASSRATGIPDRFSGSGSGTGFTLTISRLEPEDLAVYYCQQYGSSPSFGPGTKVDIK

SEQ ID NO: 1688 - protein, 8 aa, synthetic construct
  REGION 1..8: note = Synthetic
QQYGSSPS

SEQ ID NO: 1689 - protein, 123 aa, synthetic construct
  REGION 1..123: note = Synthetic
QVQLQESGPGLVKPSQTLSLTCTVSGGSISSANYYWSWIRQPPGKGLECIGYIYYSGTTYYNPSLKSRLTISLDTSKNQFSLKLSSVTAADTAVYYCARVATDWNYYYYMDVWGKGTTVTVSS

SEQ ID NO: 1690 - protein, 15 aa, synthetic construct
  REGION 1..15: note = Synthetic
ARVATDWNYYYYMDV

SEQ ID NO: 1691 - protein, 108 aa, synthetic construct
  REGION 1..108: note = Synthetic
EIVMTQSPATLSVSPGERATLSCRASQSVYSNLAWYQQKPGQAPRLLISGASTRATGFPARFSGSGSGTEFTLTISSLQSEDFAVYYCQQYNNWPSITFGQGTRLEVK

SEQ ID NO: 1692 - protein, 10 aa, synthetic construct
  REGION 1..10: note = Synthetic
QQYNNWPSIT

SEQ ID NO: 1693 - protein, 121 aa, synthetic construct
  REGION 1..121: note = Synthetic
EVQLLESGGGLVQPGGSLRLSCAASGFTFSNFAMTWVRQAPGKGLEWVSAIRNSGESTFYADSVKGRFTISRDNSKNTLYLQMNSLRVEDTAVYYCAKALSGWYIVYYGMDVWGQGTTVTV

SEQ ID NO: 1694 - protein, 16 aa, synthetic construct
  REGION 1..16: note = Synthetic
AKALSGWYIVYYGMDV

SEQ ID NO: 1695 - protein, 111 aa, synthetic construct
  REGION 1..111: note = Synthetic
DIVMTQSPXSLPVIPGESASMSCRASQSLLHSNGHTFLDWYLQKPGQSPQSLIYLGSNRASGVPDRFSGSGSGTDFTLKISRVEAEDVGIYYCMQALQTPYTFGQGTKLEI

SEQ ID NO: 1696 - protein, 9 aa, synthetic construct
  REGION 1..9: note = Synthetic
MQALQTPYT

SEQ ID NO: 1697 - protein, 124 aa, synthetic construct
  REGION 1..124: note = Synthetic
EVQLVESGGGLVQPGGSLRLSCAASGFTFSSYSMNWVRQSPGKGLEWVSYISSSGTIIHYADSVKGRFTISRDNAKNSLYLQMNSLRDEDRAVYYCARGGDLIHYYYYYGMDVWGQGTTVTVSS

SEQ ID NO: 1698 - protein, 17 aa, synthetic construct
  REGION 1..17: note = Synthetic
ARGGDLIHYYYYYGMDV

SEQ ID NO: 1699 - protein, 107 aa, synthetic construct
  REGION 1..107: note = Synthetic
DIQMTQSXXSLXASXGDRVTIYCWASQDISNFLAWFQQKPGKAHKSLIYGALFLQSGVPSKFSGSGXGTDFTLTISSLQPEDFAIYYCQQYNRYPLTFGGGTKVEIK

SEQ ID NO: 1700 - protein, 9 aa, synthetic construct
  REGION 1..9: note = Synthetic
QQYNRYPLT

SEQ ID NO: 1701 - protein, 124 aa, synthetic construct
  REGION 1..124: note = Synthetic
QVQLQESGPGLVKPSETLSLTCTVSGYSISSGYYWGWIRQPPGKGLEWIGTIYHNGSTHYNPSLKSRVAISLDTSKNQFSLKLDSVTAADTAMYYCARDIRIVVVTAVNWFDPWGQGTLVTVSS

SEQ ID NO: 1702 - protein, 17 aa, synthetic construct
  REGION 1..17: note = Synthetic
ARDIRIVVVTAVNWFDP

SEQ ID NO: 1703 - protein, 110 aa, synthetic construct
  REGION 1..110: note = Synthetic
EIVLTQSPGTLSLSPGERATLSCRASQSVSSSFLAWYQQRPGQAPRLLIYGASSRATGIPDRFSGSGSGTDFTLTISRLEPEDFAVYYCQQYGGSPPGYTFGQGTKLEIK

SEQ ID NO: 1704 - protein, 11 aa, synthetic construct
  REGION 1..11: note = Synthetic
QQYGGSPPGYT

SEQ ID NO: 1705 - protein, 118 aa, synthetic construct
  REGION 1..118: note = Synthetic
EVQLVESGGGLVQPGGSLRLSCAVSGLTFNRYSMNWVRQAPGKGLEWVSFISSSSSTIYHADSVKGRFTISRDNAKNSLYLQMNSLRAEDTAVYYCARGWVNDAFDIWGQGTMVTVSS

SEQ ID NO: 1706 - protein, 11 aa, synthetic construct
  REGION 1..11: note = Synthetic
ARGWVNDAFDI

SEQ ID NO: 1707 - protein, 107 aa, synthetic construct
  REGION 1..107: note = Synthetic
DIQMTQSPXSLSASVGDRVTITCRASQSINTYLNWYQQKPGKAPKILIYAASSLQSGVPSRFSGSGSGTDFTLTINSLQPEDFATYYCQQSYSTPFTFGPGTKVDIK

SEQ ID NO: 1708 - protein, 9 aa, synthetic construct
  REGION 1..9: note = Synthetic
QQSYSTPFT

SEQ ID NO: 1709 - protein, 125 aa, synthetic construct
  REGION 1..125: note = Synthetic
QVQLQESGPGLVKPSETLSLTCTVSGGSISTYYWSWIRQPPGKGLEWIGYIYHSGSTNYNFSLKSRVTISVDTSKNQFSLNLRSVTAADTAVYYCAREGSERHCSSGDCFNHPFDVWGQGTMVTV

SEQ ID NO: 1710 - protein, 21 aa, synthetic construct
  REGION 1..21: note = Synthetic
AREGSERHCSSGDCFNHPFDV

SEQ ID NO: 1711 - protein, 113 aa, synthetic construct
  REGION 1..113: note = Synthetic
DIVMTQSPDSLAVSLGERATINCKSSQSVLYSSNNKNYLAWYQQKPGQPPKLLIYWASTRESGVPDRFSGSGSGTDFILTISSLQPEDVAVYYCQQYYNAPRTFGQGTKVEIK

SEQ ID NO: 1712 - protein, 9 aa, synthetic construct
  REGION 1..9: note = Synthetic
QQYYNAPRT

SEQ ID NO: 1713 - protein, 126 aa, synthetic construct; identical to SEQ ID NO: 233
  REGION 1..126: note = Synthetic

SEQ ID NO: 1714 - protein, 19 aa, synthetic construct
  REGION 1..19: note = Synthetic
AKDSVWKVLVIIAGGYFDY

SEQ ID NO: 1715 - protein, 107 aa, synthetic construct
  REGION 1..107: note = Synthetic
DIQMTQSXXTLSASVGDRVTITCRASQGISSYLNWYQQKPGKAPKLLIYAATSLQSGVPSRFSGSGSGTDFTLTISNLQSEDFATYYCQQSYSTPPTFGQGTKVEIK

SEQ ID NO: 1716 - protein, 9 aa, synthetic construct
  REGION 1..9: note = Synthetic
QQSYSTPPT

SEQ ID NO: 1717 - protein, 123 aa, synthetic construct
  REGION 1..123: note = Synthetic
QVQLVESGGGVVQPGRSLRLSCAASGFTFSSYGMHWVRQAPGKGLEWVAIISFDGSNEDYADSVKGRFTISRDNSKNTLYLQMNSLRAEDTAVYYCAKDRDDGWYFINYCDSWGQGTLVTVSS

SEQ ID NO: 1718 - protein, 16 aa, synthetic construct
  REGION 1..16: note = Synthetic
AKDRDDGWYFINYCDS

SEQ ID NO: 1719 - protein, 109 aa, synthetic construct
  REGION 1..109: note = Synthetic
EIVLTQSPXSLSLSPGERATLSCRASQSVSSNYLAWYQQKPGQAPRLLIYGASSRATGIPDRFSGSGSGTDFILTISRLEPEDFAVYYCQQYGSSPGITFGPGTKVDIK

SEQ ID NO: 1720 - protein, 10 aa, synthetic construct
  REGION 1..10: note = Synthetic
QQYGSSPGIT

SEQ ID NO: 1721 - protein, 122 aa, synthetic construct
  REGION 1..122: note = Synthetic
EVQLLESGGHLVQPGGSLRLSCAASGFTFSSHAMSWVRQAPGKGLEWVSGIDGSGYITYYAESVKGRFTVSRDNSKNTLYLQVKSLRADDTAVYFCAKDVRGWLQDGYFQDWGQGTLVTVSS

SEQ ID NO: 1722 - protein, 15 aa, synthetic construct
  REGION 1..15: note = Synthetic
AKDVRGWLQDGYFQD

SEQ ID NO: 1723 - protein, 108 aa, synthetic construct
  REGION 1..108: note = Synthetic
DIQMTQSPFSLSASVGDRVTITCRASQSISDYLNWYQQKPGKAPKLLIYTASSLQSGVPSRFSGSGSGTDFTLTISSLQPEDFATYYCQQTYSTSWSTFGPGTKLEIK

SEQ ID NO: 1724 - protein, 10 aa, synthetic construct
  REGION 1..10: note = Synthetic
QQTYSTSWST

SEQ ID NO: 1725 - protein, 126 aa, synthetic construct
  REGION 1..126: note = Synthetic
EVQLVESGGGLVKPGGSLRLSCAASGFTFSGYTMNWVRQAPGKGLEWVSSLSNTGNYIYYLDSVKGRFTISRDNTKNSLFLQMNSLRAEDTAVYYCARDRNYNFWNGYYIGGMDVWGQGTTVTVSS

SEQ ID NO: 1726 - protein, 19 aa, synthetic construct
  REGION 1..19: note = Synthetic
ARDRNYNFWNGYYIGGMDV

SEQ ID NO: 1727 - protein, 108 aa, synthetic construct
  REGION 1..108: note = Synthetic
EIVMTQSPXXLSVSPGERATLSCRASQSVSSNLAWYQQKPGQAPRLLIYDASTRATDVPARFSGSGSGTEFTLTISSLQSEDFAVYYCQQYNNWPPWTFGQGTKVEIK

SEQ ID NO: 1728 - protein, 10 aa, synthetic construct [sequence omitted]

SEQ ID NO: 1729 - protein, 115 aa, synthetic construct
  REGION 1..115: note = Synthetic
EVQLVESGGRLVQPGGSLRLSCSASGFTFSTYAMHWVRQAPGKGLEYVAAISSDGLSTYYADSLQGRFTISRDNSKNTLYLQVSSLRSEDTAVYYCVSGYSYGPGGQGTLVTVSS

SEQ ID NO: 1730 - skipped

SEQ ID NO: 1731 - protein, 108 aa, synthetic construct
  REGION 1..108: note = Synthetic
EIVMTQSPXTLSVSPGERATLSCRASQSVGSNLAWYQQKPGQAPRLLIYGASARATGIPARFSGSGSGTEFTLTISSLQSEDFAVYYCQQYNNWPPYTFGQGTKLEIK

SEQ ID NO: 1732 - protein, 10 aa, synthetic construct
  REGION 1..10: note = Synthetic
QQYNNWPPYT

SEQ ID NO: 1733 - protein, 131 aa, synthetic construct
  REGION 1..131: note = Synthetic
QVQLQESGPGLVKPSQTLSLTCTVSGASISRGGYYWSWIRQYPGKGLEWIGYIYYSGSTYYNPSLKSRITISVDTSENRFSLKLTSVTAADTAVYYCAREGRDYDSGTDSVNAKNDAFDIWGQGTMVTVSS

SEQ ID NO: 1734 - protein, 23 aa, synthetic construct
  REGION 1..23: note = Synthetic
AREGRDYDSGTDSVNAKNDAFDI

SEQ ID NO: 1735 - protein, 112 aa, synthetic construct
  REGION 1..112: note = Synthetic
DIVMTQSPVTLAVSLGERATINCKSSQSVLFSSNNKNYLAWYQQKAGQPPKLLIYWASTRKSGVPDRFSGSGSGTDFTLTIGSLQAEDVAVYYCQQYYSLRTFGQGTKVEIK

SEQ ID NO: 1736 - protein, 8 aa, synthetic construct
  REGION 1..8: note = Synthetic
QQYYSLRT

SEQ ID NO: 1737 - protein, 120 aa, synthetic construct
  REGION 1..120: note = Synthetic
QVQLVQSGAEVKKPGASVKVSCKTSGYTFTGYYIQWVXQAHGQGAQWMGSIDXYSGVTEYAQKFQDRVTMTRDTSITTAYMELSRLRSDDTAVYYCARAPHYDFWSFGYWGQGTLVTVSS

SEQ ID NO: 1738 - protein, 13 aa, synthetic construct
  REGION 1..13: note = Synthetic
ARAPHYDFWSFGY

SEQ ID NO: 1739 - protein, 109 aa, synthetic construct
  REGION 1..109: note = Synthetic
EIVLTQSPGTLSLSPGERATLSCRASQSVSSRYLAWYQQKPGQAPRLLIYGASSRATGIPDRFSGSGSGTDFSLTISRLEPEDFAMYYCQQYGSSPPWTFGQGTKVEIK

SEQ ID NO: 1740 - protein, 10 aa, synthetic construct
  REGION 1..10: note = Synthetic
QQYGSSPPWT

SEQ ID NO: 1741 - protein, 121 aa, synthetic construct
  REGION 1..121: note = Synthetic
QVQLQQWGAGLLKPSETLSLTCAVYGASFSGYYWSWIRQPPGKGLEWIGDINHIGDTNYNPSLQSRVTISVDTSKNQFSLKLSSVTAADTAVYYCASYDFAAQLEGWFDSWGQGTLVTVSS

SEQ ID NO: 1742 - protein, 15 aa, synthetic construct
  REGION 1..15: note = Synthetic
ASYDFAAQLEGWFDS

SEQ ID NO: 1743 - protein, 107 aa, synthetic construct
  REGION 1..107: note = Synthetic
DIQMTQSPSSVSASVGDRVTITCRASQGISSWLAWYQQKPGKAPNLLIYAASSLQSGVPSRFSGSGSGTDFTLTISSLQPEDSAIYYCQQASSFPFTFGPGTKVDFK

SEQ ID NO: 1744 - protein, 9 aa, synthetic construct
  REGION 1..9: note = Synthetic
QQASSFPFT

SEQ ID NO: 1745 - protein, 116 aa, synthetic construct
  REGION 1..116: note = Synthetic
EVQLVESGGGLVQPGGSLRLSCSASGFTFSNYPMHWVRQAPGKGLEYVSVISSEGGSTYYADSVKGRFTISRDNSKNTLYLQMSSLRAEDTAVYYCVDGWGVSNYWGQGTLVTVSS

SEQ ID NO: 1746 - protein, 9 aa, synthetic construct
  REGION 1..9: note = Synthetic
VDGWGVSNY

SEQ ID NO: 1747 - protein, 108 aa, synthetic construct
  REGION 1..108: note = Synthetic
EIVMTQSPVXLSVSPGERATLSCRASQSVSSNLAWYQQKPGQAPRLLIYGASTRATGIPARFSGSGSGTDFTLTISSLQSEDFAVYYCQHYNNWPPYTFGQGTKLEIK

SEQ ID NO: 1748 - protein, 10 aa, synthetic construct
  REGION 1..10: note = Synthetic
QHYNNWPPYT

SEQ ID NO: 1749 - protein, 123 aa, synthetic construct
  REGION 1..123: note = Synthetic
QVQLVESGGGLVKPGGSLRLSCAASGFTFSDYDMSWIRQAPGKGLEWVSYINNRGSTIYYADSVKGRFTISRDNAKNSLYLQMNSLRAEDTAVYYCAREVSSGWYVFYYFEYWGQGTLVTVSS

SEQ ID NO: 1750 - protein, 16 aa, synthetic construct
  REGION 1..16: note = Synthetic
AREVSSGWYVFYYFEY

SEQ ID NO: 1751 - protein, 112 aa, synthetic construct
  REGION 1..112: note = Synthetic
QSVLTQPASVSGSPGQSITISCTGTSSDVGNYNLVSWYQQHPGKAPELMIYEGSKRPSGVSNRFSGSKSGNTASLTISGLQAEDEADYYCCSYAGRSTFHVVFGGGTKLTVL

SEQ ID NO: 1752 - protein, 12 aa, synthetic construct
  REGION 1..12: note = Synthetic
CSYAGRSTFHVV

SEQ ID NO: 1753 - protein, 121 aa, synthetic construct
  REGION 1..121: note = Synthetic
QVQLVQSGAEVKKPGASVKVSCKVSGYTLTELSMHWVRQAPGKGLEWMGGFDPEDGETIYAQKFQGRVTMTEDTSTDTAYMELSSLRSEDTAVYYCATGSPVLFPNWFDPWGQGTLVTVSS

SEQ ID NO: 1754 - protein, 14 aa, synthetic construct
  REGION 1..14: note = Synthetic
ATGSPVLFPNWFDP

SEQ ID NO: 1755 - protein, 111 aa, synthetic construct
  REGION 1..111: note = Synthetic
QFVLTQPASVSGSPGQSITISCTGTSSDVGGYNYVSWYQQHPGKAPKLMIYEVSNRPSGVSNRFSGSKSGNTASLTISGLQAEDEADYYCSSYTSSSTPLAFGGGTKLTVL

SEQ ID NO: 1756 - protein, 11 aa, synthetic construct
  REGION 1..11: note = Synthetic
SSYTSSSTPLA

SEQ ID NO: 1757 - protein, 125 aa, synthetic construct
  REGION 1..125: note = Synthetic
QVQLVQSGAEVKKPGSSVKVSCKASGGTFSSYAINWVRQAPGQGLEWMGRIIPILGIANYAQKFQGRVTITADKSTSTAYMELSSLTSEDTAVYYCARDGLITGTQENYYGMDVWGQGTTVTVSS

SEQ ID NO: 1758 - protein, 18 aa, synthetic construct
  REGION 1..18: note = Synthetic
ARDGLITGTQENYYGMDV

SEQ ID NO: 1759 - protein, 108 aa, synthetic construct
  REGION 1..108: note = Synthetic
SYVLTQPPSVSVSPGQTARITCSGDALPKEYAYWYQQKPGQAPVLVIYKDSERPSGIPERFSGSSSGTTVTLTISGVQAEDEADYYCQSADSTETYVVFGGGTKLTVL

SEQ ID NO: 1760 - protein, 11 aa, synthetic construct
  REGION 1..11: note = Synthetic
QSADSTETYVV

SEQ ID NO: 1761 - protein, 127 aa, synthetic construct
  REGION 1..127: note = Synthetic
QVQLQESGPGLVKPSQTLSLTCTVSGGSISNGDYYWSWIRQPPGKGLEWIGYIYYSGSTYSNPSLKSRLTISVDTSKNQFSLKLRSVTAADTAVYYCASAQAEESLGRNYYYGMDVWGQGTTVTVSS

SEQ ID NO: 1762 - protein, 19 aa, synthetic construct
  REGION 1..19: note = Synthetic
ASAQAEESLGRNYYYGMDV

SEQ ID NO: 1763 - protein, 105 aa, synthetic construct
  REGION 1..105: note = Synthetic
SYVLTQPPSVSVSPGQTASITCSGDKLGDKYACWYQQKPGQSPVLVIYQDTKRPSGIPERFSGSNSGNTATLTISGTQAMDEADYYCQAWDNYVVFGGGTKLTVL

SEQ ID NO: 1764 - protein, 8 aa, synthetic construct
  REGION 1..8: note = Synthetic
QAWDNYVV

SEQ ID NO: 1765 - protein, 124 aa, synthetic construct
  REGION 1..124: note = Synthetic
EVQLLESGGGLVQPGGSLRLSCAASGFTFSSYAMSWVRQAPGKGLEWVSAISGSGDSTYYADSVKGRFTISRDNSKNTLFLQMNSLRAEDTAVYYCAKNERIIILVVVTLFDYWGQGTLVTVSS

SEQ ID NO: 1766 - protein, 17 aa, synthetic construct
  REGION 1..17: note = Synthetic
AKNERIIILVVVTLFDY

SEQ ID NO: 1767 - protein, 112 aa, synthetic construct
  REGION 1..112: note = Synthetic
QFVLTQPPSESAAPGQKVTISCSGSSSNIGNNYVSWYQQLPGTAPKLLIYDNNKRPSGIPDRFSGSKSGTSATLGITGLQTGDEADYYCGTWDSSLSAGGVVFGGGTKLTVL

SEQ ID NO: 1768 - protein, 13 aa, synthetic construct
  REGION 1..13: note = Synthetic
GTWDSSLSAGGVV

SEQ ID NO: 1769 - protein, 124 aa, synthetic construct; identical to SEQ ID NO: 347
  REGION 1..124: note = Synthetic

SEQ ID NO: 1770 - protein, 17 aa, synthetic construct
  REGION 1..17: note = Synthetic
ARDRPGSSSWYEFGFDY

SEQ ID NO: 1771 - protein, 108 aa, synthetic construct
  REGION 1..108: note = Synthetic
SYVLTQPPSVSVAPGQTATISCGGNNIGRKSVHWHQQKPGQAPVLVVYDDSDRPSGIPERFSGSNSGNTATLTISRVEAGDEADYYCQVWDSSSDHVVFGGGTKLTVL

SEQ ID NO: 1772 - protein, 11 aa, synthetic construct
  REGION 1..11: note = Synthetic
QVWDSSSDHVV

SEQ ID NO: 1773 - protein, 124 aa, synthetic construct
  REGION 1..124: note = Synthetic
QVQLVESGGGVVQPGRSLRLSCAASGFTFSSYAMHWVRQAPGKGLEWVAVISYDGSNKYYADSVKGRFTISRDNSKNTLYLQMNSLRAEDTAVYYCASGCRSTSCYTGDAFDIWGQGTMVTVSS

SEQ ID NO: 1774 - protein, 17 aa, synthetic construct
  REGION 1..17: note = Synthetic
ASGCRSTSCYTGDAFDI

SEQ ID NO: 1775 - protein, 107 aa, synthetic construct
  REGION 1..107: note = Synthetic
SYVLTQPPSVSVSPGQTARITCSADALPKQYAYWYQQKPGQAPVLVIYKDNERPSGIPERFSGSSSGTTVTLTISGVQAEDEADYYCQSADSSGTWVFGGGTKLTVL

SEQ ID NO: 1776 - protein, 10 aa, synthetic construct
  REGION 1..10: note = Synthetic
QSADSSGTWV

SEQ ID NO: 1777 - protein, 121 aa, synthetic construct
  REGION 1..121: note = Synthetic
QVQLVQSGTEVKKPGASVKVSCKVSGYTLPELSMHWVRQAPGKGLEWMGGFDPEDGETIYAQKLQGRVTMTEDTSTDTAYMELSRLRSEDTAVYYCTTGPAVVRATWFDPWGQGTLVTVSS

SEQ ID NO: 1778 - protein, 14 aa, synthetic construct
  REGION 1..14: note = Synthetic
TTGPAVVRATWFDP

SEQ ID NO: 1779 - protein, 110 aa, synthetic construct
  REGION 1..110: note = Synthetic
QFVLTQPPSVSAAPRQKVTISCSGSSSNIGNNYVSWYQQLPGTAPKLLIYDNNKRPSGIPDRFSGSKSGTSATLGITGLQTGDEVDYYCGTWDSSLSSWVFGGGTKLTVL

SEQ ID NO: 1780 - protein, 11 aa, synthetic construct
  REGION 1..11: note = Synthetic
GTWDSSLSSWV

SEQ ID NO: 1781 - protein, 128 aa, synthetic construct; identical to SEQ ID NO: 345
  REGION 1..128: note = Synthetic

SEQ ID NO: 1782 - protein, 21 aa, synthetic construct
  REGION 1..21: note = Synthetic
ARELPPVLRYFDWLSSWAFDI

SEQ ID NO: 1783 - protein, 110 aa, synthetic construct
  REGION 1..110: note = Synthetic
QFVLTQPPSASGSPGQSVTISCTGTSSDVGGYNYVSWYQQHPGKAPKLMIYEVSKRPSGVPDRFSGSKSGNTASLTVSGLQAEDEADYYCSSYAGSNNYVFGTGTKVTVL

SEQ ID NO: 1784 - protein, 10 aa, synthetic construct
  REGION 1..10: note = Synthetic
SSYAGSNNYV

SEQ ID NO: 1785 - protein, 122 aa, synthetic construct; identical to SEQ ID NO: 341
  REGION 1..122: note = Synthetic

SEQ ID NO: 1786 - protein, 15 aa, synthetic construct
  REGION 1..15: note = Synthetic
ARDFGYSYGRDAFDI

SEQ ID NO: 1787 - protein, 111 aa, synthetic construct
  REGION 1..111: note = Synthetic
QFVLTQPPSVSGAPGQRVTISCTGSRLSIGAGYDVHWYQQLPGTAPKLLIYGNNYRPSGVPDRFSGSKSGTSASLAITGLQAEDEADYYCQSYDSSLSGWVFGGGTKLTVL

SEQ ID NO: 1788 - protein, 11 aa, synthetic construct
  REGION 1..11: note = Synthetic
QSYDSSLSGWV

SEQ ID NO: 1789 - protein, 120 aa, synthetic construct; identical to SEQ ID NO: 369
  REGION 1..120: note = Synthetic

SEQ ID NO: 1790 - protein, 14 aa, synthetic construct
  REGION 1..14: note = Synthetic
ARWWGSGYYYVGDY

SEQ ID NO: 1791 - protein, 110 aa, synthetic construct
  REGION 1..110: note = Synthetic
QFVLTQPASVSGSPGQSITISCTGTSSDVGSYNLVSWYQQHPGKAPKLMIYEGSKRPSGVSNRFSGSKSGNTASLTISGLQAEDEADYYCCSYAGSSTWVFGGGTKLTVL

SEQ ID NO: 1792 - protein, 10 aa, synthetic construct
  REGION 1..10: note = Synthetic
CSYAGSSTWV

SEQ ID NO: 1793 - protein, 128 aa, synthetic construct
  REGION 1..128: note = Synthetic
QVQLVESGGGVVQPGRSLRLSCAASGFTFSSYGMHWVRQAPGKGLEWVAVIWYDGSNKYYADSVKGRFTISRDNSKNTLYLQMNSLRAEDTAVYYCARDGGYSYGLEGDYYYYGMDVWGQGTTVTVSS

SEQ ID NO: 1794 - protein, 21 aa, synthetic construct
  REGION 1..21: note = Synthetic
ARDGGYSYGLEGDYYYYGMDV

SEQ ID NO: 1795 - protein, 108 aa, synthetic construct
  REGION 1..108: note = Synthetic
SYVLTQPPSVSVSPGQTARITCSGDALPKQYAYWYQQKPGQAPVLVIYKDSERPSGIPERFSGSSSGTTVTLTISGVQAEDEADYYCQSADSSGTYVVFGGGTKLTVL

SEQ ID NO: 1796 - protein, 11 aa, synthetic construct
  REGION 1..11: note = Synthetic
QSADSSGTYVV

SEQ ID NO: 1797 - protein, 125 aa, synthetic construct
  REGION 1..125: note = Synthetic
QVQLVQSGAEVRKPGASVKVSCKASGYTFSNYGVSWVRQAPGQGLEWMGWISVYNGNTNYAQKFQGRVTITTDTSTSTAYMELRSLRSDDTAVYHCAREHFYTPMAIRHGAMDVWGQGTTVTVSS

SEQ ID NO: 1798 - protein, 18 aa, synthetic construct
  REGION 1..18: note = Synthetic
AREHFYTPMAIRHGAMDV

SEQ ID NO: 1799 - protein, 111 aa, synthetic construct
  REGION 1..111: note = Synthetic
QFVLTQSPSASASLGASVKLTCTLSSGHNNYAIAWHQQQPEKGPRYLMKVNSDGSHTKGDGIPDRFSGSSSGAERYLTISSLQSEDEADYYCQTWGTGIRIFGGGTKLTVL

SEQ ID NO: 1800 - protein, 9 aa, synthetic construct
  REGION 1..9: note = Synthetic
QTWGTGIRI

SEQ ID NO: 1801 - protein, 122 aa, synthetic construct; identical to SEQ ID NO: 367
  REGION 1..122: note = Synthetic

SEQ ID NO: 1802 - protein, 16 aa, synthetic construct
  REGION 1..16: note = Synthetic
ARSTIFGVTIPGCFDY

SEQ ID NO: 1803 - protein, 106 aa, synthetic construct
  REGION 1..106: note = Synthetic
SYVLTQPPSVSVAPGQTARITCGGNNIGSKSVHWYQQKPGQAPVLVVYDDSDRPSGIPERFSGSNSGNTATLTISRVEAGDEADYYCQVWDSSSVVFGGGTKLTVL

SEQ ID NO: 1804 - protein, 9 aa, synthetic construct
  REGION 1..9: note = Synthetic
QVWDSSSVV

SEQ ID NO: 1805 - protein, 121 aa, synthetic construct
  REGION 1..121: note = Synthetic
QVQLVQSGAEVKKPGASVKVSCKVSGYTLTELSMHWVRQAPGKGLEWMGGFDPEDVETIYAQKFQGRVTMTEDTSTDTAYMELSSLRSEDTAVYYCATSFAIFGVVSPDYWGQGTLVTVSS

SEQ ID NO: 1806 - protein, 14 aa, synthetic construct
  REGION 1..14: note = Synthetic
ATSFAIFGVVSPDY

SEQ ID NO: 1807 - protein, 111 aa, synthetic construct
  REGION 1..111: note = Synthetic
QSVLTQPPSVSAAPGQKVTISCSGSSSNIGNNYVSWYQQLPGTAPKLLIYENNKRPSGIPDRFSGSKSGTSATLGITGLQTGDEADYYCGTWDSSLSAYVVFGGGTKLTVL

SEQ ID NO: 1808 - protein, 12 aa, synthetic construct
  REGION 1..12: note = Synthetic
GTWDSSLSAYVV

SEQ ID NO: 1809 - protein, 126 aa, synthetic construct
  REGION 1..126: note = Synthetic
EVQLVESGGGLVKPGGSLRLSCAASGFTFSSYSMNWVRQAPGKGLEWVSSISSSSGYIYYADSVKGRFTISRDSAKNSLNLQMNSLRAEDTAVYYCARDQGYSSGSYYYYYGMDVWGQGTTVTVSS

SEQ ID NO: 1810 - protein, 19 aa, synthetic construct
  REGION 1..19: note = Synthetic
ARDQGYSSGSYYYYYGMDV

SEQ ID NO: 1811 - protein, 109 aa, synthetic construct
  REGION 1..109: note = Synthetic
SYVLTQPPSVSVAPGKTARITCGENNIGSKSVRWYQQKPGQAPVLVVNDDSDRPSGIPERFSGSNSGNTATLTISRVEAGDEADYYCQLWDSSSDHPKVFGGGTKLTVL

SEQ ID NO: 1812 - protein, 12 aa, synthetic construct
  REGION 1..12: note = Synthetic
QLWDSSSDHPKV

SEQ ID NO: 1813 - protein, 124 aa, synthetic construct
  REGION 1..124: note = Synthetic
QVQLVESGGGVVQPGRSLRLSCAASGLTFSSYAMHWVRQAPGKGLEWVAVISYDGRNKYYADSVKGRFTISRDDSKNTLYVQMNNLRAEDTAVYYCASSEGESQYYYYYGMDVWGQGTTVTVSS

SEQ ID NO: 1814 - protein, 17 aa, synthetic construct
  REGION 1..17: note = Synthetic
ASSEGESQYYYYYGMDV

SEQ ID NO: 1815 - protein, 108 aa, synthetic construct
  REGION 1..108: note = Synthetic
SYVLTQPPSVSVSPGQTARITCSGDALPKQYAYWYQQKPGQAPVLVIYKDNERPSGIPERFSGSSSGTTVTLTISGVQAEDEADYYCQSADSSDNYVVFGGGTKLTVL

SEQ ID NO: 1816 - protein, 11 aa, synthetic construct
  REGION 1..11: note = Synthetic
QSADSSDNYVV

SEQ ID NO: 1817 - protein, 124 aa, synthetic construct; identical to SEQ ID NO: 349
  REGION 1..124: note = Synthetic

SEQ ID NO: 1818 - protein, 17 aa, synthetic construct
  REGION 1..17: note = Synthetic
AQGERIAMMVVLTVIDH

SEQ ID NO: 1819 - protein, 110 aa, synthetic construct; identical to SEQ ID NO: 350
  REGION 1..110: note = Synthetic

SEQ ID NO: 1820 - protein, 11 aa, synthetic construct
  REGION 1..11: note = Synthetic
GTWDSSLSAYV

SEQ ID NO: 1821 - protein, 120 aa, synthetic construct; identical to SEQ ID NO: 359
  REGION 1..120: note = Synthetic

SEQ ID NO: 1822 - protein, 13 aa, synthetic construct
  REGION 1..13: note = Synthetic
ATSSIAVAGWFDP

SEQ ID NO: 1823 - protein, 110 aa, synthetic construct
  REGION 1..110: note = Synthetic
QSVLTQPASVSGSPGQSITISCTGTSSDVGGYNYVSWYQQHPGKAPKLMIYEVSNRPSGVSNRFSGSKSGNTASLTISGLQAEDEADYYCSSYTSSSTRVFGTGTKVTVL

SEQ ID NO: 1824 - protein, 10 aa, synthetic construct
  REGION 1..10: note = Synthetic
SSYTSSSTRV

SEQ ID NO: 1825 - protein, 131 aa, synthetic construct
  REGION 1..131: note = Synthetic
QVQLVESGGGVVQPGRSLRLSCAASGFTFSSYAMHWVRQAPGKGLEWVAVISYDGSNKYYADSVKGRFTISRDNSKNTLYLQMNSLRAEDTAVYYCARDQQTLNPYSSRWYSVGEWYFDLWGRGTLLTVSS

SEQ ID NO: 1826 - protein, 24 aa, synthetic construct
  REGION 1..24: note = Synthetic
ARDQQTLNPYSSRWYSVGEWYFDL

SEQ ID NO: 1827 - protein, 111 aa, synthetic construct
  REGION 1..111: note = Synthetic
QSVLTQSPSASASLGASVKLTCTLSSGHSSYAIAWHQQQPEKGPRYLMKLNSDGTHNKGDGIPDRFSGSSSGAERYLTISSLQSEDEADYYCQTWGTGIVLFGGGTKLTVL

SEQ ID NO: 1828 - protein, 9 aa, synthetic construct
  REGION 1..9: note = Synthetic
QTWGTGIVL

SEQ ID NO: 1829 - protein, 124 aa, synthetic construct
  REGION 1..124: note = Synthetic
QVQLVESGGGVVQPGRSLRLSCAASGFTLGSYGMHWVRQAPGKGLEWVAVISYDGSNKYYGDSVKGRFTISRDNSKNTLYLQMNNLRAEDTAVYYCANADGEGIYYNYYGMGVWGQGTTVTVSS

SEQ ID NO: 1830 - protein, 17 aa, synthetic construct
  REGION 1..17: note = Synthetic
ANADGEGIYYNYYGMGV

SEQ ID NO: 1831 - protein, 108 aa, synthetic construct
  REGION 1..108: note = Synthetic
SYVLTQPPSVSVSPGQTARITCSGDALPKQYAYWYQQKPGQAPVLVIYKDSERPSGIPERFSGSSSGTTVTLTISGVQAEDEADYYCQSADSNGTYVVFGGGTKLTVL

SEQ ID NO: 1832 - protein, 11 aa, synthetic construct
  REGION 1..11: note = Synthetic
QSADSNGTYVV

SEQ ID NO: 1833 - protein, 122 aa, synthetic construct
  REGION 1..122: note = Synthetic
QLQLQESGPGLVKPSETLSLTCTVSGGSISSSSYYWGWIRQPPGKGLEWIGSIYYSGTTYCNPSLKSRVTISVDTSKNQFSLKLTSVTAADTAVYYCARHPLAVAGASFDYWGQGTLVTVSS

SEQ ID NO: 1834 - protein, 14 aa, synthetic construct
  REGION 1..14: note = Synthetic
ARHPLAVAGASFDY

SEQ ID NO: 1835 - protein, 110 aa, synthetic construct
  REGION 1..110: note = Synthetic
QSVLTQPASVSGSPGQSITISCTGTSSDVGSYNLVSWYQQHPGKAPKLMIYVGSKRPSGVSNRFSGSKSGNTASLTISGLQAEDEADYYCCSYTDSSTWVFGGGTKLTVL

SEQ ID NO: 1836 - protein, 10 aa, synthetic construct
  REGION 1..10: note = Synthetic
CSYTDSSTWV

SEQ ID NO: 1837 - protein, 127 aa, synthetic construct
  REGION 1..127: note = Synthetic
QVQLVQSGAEVKKPGASVKVSCKVSGYTLTELSIHWVRQAPGKGLEWMGSFDPEDGETICAQKFQGRVTMTEDTSTDTAYMELSSLRSEDTAVYYCATEWRGCSDTSCQGTNWFDPWGQGTLVTVSP

SEQ ID NO: 1838 - protein, 20 aa, synthetic construct
  REGION 1..20: note = Synthetic
ATEWRGCSDTSCQGTNWFDP

SEQ ID NO: 1839 - protein, 111 aa, synthetic construct
  REGION 1..111: note = Synthetic
QSVLTQSPSASASLGASVKLTCTLSSGHSTYAIAWHQQQPEKGPRYLMKLNSDGSHNKGDGIPDRFSGSSSGAERYLTISSLQSEDEADYYCQTWGTGVRVFGGGTKLTVL

SEQ ID NO: 1840 - protein, 9 aa, synthetic construct
  REGION 1..9: note = Synthetic
QTWGTGVRV

SEQ ID NO: 1841 - protein, 123 aa, synthetic construct
  REGION 1..123: note = Synthetic
EVQLLESGGGLVQPGGSLRLSCAASGFTFTSYAMSWVRQAPGKGLEWVSTISVSGGSTYYADSVKGRFTISRDNSKNTLYLQMNSLRAEDTAVYYCAKDSSSGIVGPTMADYWGQGTLVTVSS

SEQ ID NO: 1842 - protein, 16 aa, synthetic construct
  REGION 1..16: note = Synthetic
AKDSSSGIVGPTMADY

SEQ ID NO: 1843 - protein, 110 aa, synthetic construct
  REGION 1..110: note = Synthetic
QSVLTQPASVSGSPGQSITISCTGTSSDVGGYNYVSWYQQHPGKAPKLMIYDVSNRPSGVSNRFSGSKSGNTASLTISGLQAEDEADYYCSSYTSSSFYVFGTGTKVTVL

SEQ ID NO: 1844 - protein, 10 aa, synthetic construct
  REGION 1..10: note = Synthetic
SSYTSSSFYV

SEQ ID NO: 1845 - protein, 125 aa, synthetic construct; identical to SEQ ID NO: 361
  REGION 1..125: note = Synthetic

SEQ ID NO: 1846 - protein, 18 aa, synthetic construct
  REGION 1..18: note = Synthetic
AREPTTMVRGITVGYFDL

SEQ ID NO: 1847 - protein, 107 aa, synthetic construct
  REGION 1..107: note = Synthetic
EIVMTQSPATLSVSXGERATLSCRASQSVSSNLAWYQQKPGQAPRLLIYGASTRATGIPARFSGSESGTEFTLTISSLQSEDFAVYYCQQYNNWPRTFGQGTKVEIK

SEQ ID NO: 1848 - protein, 9 aa, synthetic construct
  REGION 1..9: note = Synthetic
QQYNNWPRT

SEQ ID NO: 1849 - protein, 128 aa, synthetic construct
  REGION 1..128: note = Synthetic
QVQLVQSGAEVKKPGASVKVSCKASGYTFSNYGISWVRQAPGQGLEWMGWISFYNGDTNYVQKLQGRVTMTTDTSTSTAYMELRSLRSDDTAVYYCARSLRYFDSVWGIYRYPPFDYWGQGTLVTVSS

SEQ ID NO: 1850 - protein, 21 aa, synthetic construct
  REGION 1..21: note = Synthetic
ARSLRYFDSVWGIYRYPPFDY

SEQ ID NO: 1851 - protein, 113 aa, synthetic construct
  REGION 1..113: note = Synthetic
DIVMTQSPDSLAVSLGERATINCKSSQSVLYSSNNKNYLAWYQQKPGQPPKLLVYWASTRESGVPDRFSGSGSGTDFTLTISSLQAEDVAVYYCQQYYSTPVGFGQGTKVEIK

SEQ ID NO: 1852 - protein, 9 aa, synthetic construct
  REGION 1..9: note = Synthetic
QQYYSTPVG

SEQ ID NO: 1853 - protein, 125 aa, synthetic construct
  REGION 1..125: note = Synthetic
QVQLQESGPGLVKPSQTLSLTCTVSGGSISSGGYYWSWIRQHPGKGLEWIGYIYYSGITYYNPSLKSRVSMSVDTSKNQFSLKLSSVTAADTAVYYCARGDDTTGYSLKGTFDYWGQGTLVTVSS

SEQ ID NO: 1854 - protein, 17 aa, synthetic construct
  REGION 1..17: note = Synthetic
ARGDDTTGYSLKGTFDY

SEQ ID NO: 1855 - protein, 107 aa, synthetic construct; identical to SEQ ID NO: 326
  REGION 1..107: note = Synthetic

SEQ ID NO: 1856 - protein, 9 aa, synthetic construct
  REGION 1..9: note = Synthetic
LQHNSYPLT

SEQ ID NO: 1857 - protein, 120 aa, synthetic construct
  REGION 1..120: note = Synthetic
QVQLQESGPGLVKPSQTLSLTCTVSGGSISSGGYYWSWIRQHPGKGLEWIGYIYYSGSTYYNPSLKSRVTISIDTSKNQFSLKLSSVTAADTAVYYCATSQYGDYQLDPWGQGTLVTVSS

SEQ ID NO: 1858 - protein, 12 aa, synthetic construct
  REGION 1..12: note = Synthetic
ATSQYGDYQLDP

SEQ ID NO: 1859 - protein, 107 aa, synthetic construct
  REGION 1..107: note = Synthetic
DIQMTQSPXXLSASVGDRVTITCRASQGISDFLAWYQQKPGKVPKLLIYAASALQSGVPSRFSGSGSGTDFTLTISSLQPEDVATYYCQKYNSAPWTFGQGTKVEIK

SEQ ID NO: 1860 - protein, 9 aa, synthetic construct
  REGION 1..9: note = Synthetic
QKYNSAPWT

SEQ ID NO: 1861 - protein, 126 aa, synthetic construct; identical to SEQ ID NO: 353
  REGION 1..126: note = Synthetic

SEQ ID NO: 1862 - protein, 19 aa, synthetic construct
  REGION 1..19: note = Synthetic
ARDSGIEGAKWVAAWYFDL

SEQ ID NO: 1863 - protein, 107 aa, synthetic construct
  REGION 1..107: note = Synthetic
DIQMTQSPXXLSASVGDRVTLTCRASQSISSWLAWYQQKLGNAPKLLIYKASTLESGVPSRFSGSGSGTDFTLTISSLQPDDFATYYCQQYNTYSGTFGQGTKVEIK

SEQ ID NO: 1864 - protein, 9 aa, synthetic construct
  REGION 1..9: note = Synthetic
QQYNTYSGT

SEQ ID NO: 1865 - protein, 126 aa, synthetic construct; identical to SEQ ID NO: 357
  REGION 1..126: note = Synthetic

SEQ ID NO: 1866 - protein, 16 aa, synthetic construct
  REGION 1..16: note = Synthetic
ARVVVPAAIIFTWFDP

SEQ ID NO: 1867 - protein, 107 aa, synthetic construct; identical to SEQ ID NO: 358
  REGION 1..107: note = Synthetic

SEQ ID NO: 1868 - protein, 9 aa, synthetic construct
  REGION 1..9: note = Synthetic
QQYNNWPQT

SEQ ID NO: 1869 - protein, 123 aa, synthetic construct; identical to SEQ ID NO: 337
  REGION 1..123: note = Synthetic

SEQ ID NO: 1870 - protein, 15 aa, synthetic construct
  REGION 1..15: note = Synthetic
APYFSGYSYDEAFDI

SEQ ID NO: 1871 - protein, 107 aa, synthetic construct; identical to SEQ ID NO: 338
  REGION 1..107: note = Synthetic

SEQ ID NO: 1872 - protein, 9 aa, synthetic construct
  REGION 1..9: note = Synthetic
LQYNSYPLT

SEQ ID NO: 1873 - protein, 123 aa, synthetic construct
  REGION 1..123: note = Synthetic
QLQLQESGPGLVKPSETLSLTCTVSGGSISSSSYYWGWIRQPPGKGLEWIGSIFYSGSTYYNPSLKSRVTLSVDTSKNQFSLKLSSVTAADTAVYYCAPYSYGYSYDDAFDIWGQGTMVTVSS

SEQ ID NO: 1874 - protein, 15 aa, synthetic construct
  REGION 1..15: note = Synthetic
APYSYGYSYDDAFDI

SEQ ID NO: 1875 - protein, 107 aa, synthetic construct
  REGION 1..107: note = Synthetic
DIQMTQSPXSLSASVGDRVTITCRASQGIRNDLGWYQQKPGKAPKRLIYGASSLQSGVPSRFSGSGSGTEFTLTISSLQPEDFATYYCLQHNSYPLTFGGGTKVEIK

SEQ ID NO: 1876 - protein, 9 aa, synthetic construct
  REGION 1..9: note = Synthetic
LQHNSYPLT

SEQ ID NO: 1877 - protein, 123 aa, synthetic construct
  REGION 1..123: note = Synthetic
QLQLQESGPGLVKPSETLSLTCTVSGGSISSSTYYWGWIRQPPGKGLEWIGNIYYSGSTYYNPSLKSRVTISVDTSKNQFSLKLSSVTAADTAVYYCASYSYGYSYDEAFDIWGQGTMVTVSS

SEQ ID NO: 1878 - protein, 15 aa, synthetic construct
  REGION 1..15: note = Synthetic
ASYSYGYSYDEAFDI

SEQ ID NO: 1879 - protein, 107 aa, synthetic construct
  REGION 1..107: note = Synthetic
DIQMTQSPSSLSASVGDRVTITCRASQGIRNDLGWYQQKPGKAPKRLIYAASSLQSGVPSRFSGSGSGTEFTLTISSLQPEDVATYYCLQHNSYPLTFGGGTKVEIK

SEQ ID NO: 1880 - protein, 9 aa, synthetic construct
  REGION 1..9: note = Synthetic
LQHNSYPLT

SEQ ID NO: 1881 - protein, 119 aa, synthetic construct
  REGION 1..119: note = Synthetic
QVQLVESGGGLVKPGGSLRLSCAASGFTFSDYHMSWIRQAPGKGLECISYISRSESTIYDADSVKGRFTSSRDNAKNSLYLQMNSLRAEDTAVYYCAREGYSSESFDYWGQGTLVTVSS

SEQ ID NO: 1882 - protein, 12 aa, synthetic construct
  REGION 1..12: note = Synthetic
AREGYSSESFDY

SEQ ID NO: 1883 - protein, 107 aa, synthetic construct
  REGION 1..107: note = Synthetic
DIQMTQSPSSLSASVGDRVTITCRASQSISSYLNWYQQKPGKAPKLLIYAASSLQSGVPSRFSGSGSGTDFTLTISSLQPEDFATYYCQQSYSTPPTFGQGTKVEIK

SEQ ID NO: 1884 - protein, 9 aa, synthetic construct
  REGION 1..9: note = Synthetic
QQSYSTPPT

SEQ ID NO: 1885 - protein, 127 aa, synthetic construct
  REGION 1..127: note = Synthetic
EVQLVESGGGLVKPGGSLRLSCAASGFTFSSYSMNWVRQAPGKGLEWVSSINSRSSYIYYADSVKGRFTISRDNAKNSLYLQMNSLRAEDTAVYYCARVEAHYYDTSGYYPNYIDYWGQGTLVTVSS

SEQ ID NO: 1886 - protein, 20 aa, synthetic construct
  REGION 1..20: note = Synthetic
ARVEAHYYDTSGYYPNYIDY

SEQ ID NO: 1887 - protein, 108 aa, synthetic construct; identical to SEQ ID NO: 344
  REGION 1..108: note = Synthetic

SEQ ID NO: 1888 - protein, 10 aa, synthetic construct
  REGION 1..10: note = Synthetic
QQYYNWPPWT

SEQ ID NO: 1889 - protein, 128 aa, synthetic construct
  REGION 1..128: note = Synthetic
EVQLVESGGGLVKPGGSLRLSCAASGFTFSSYTVNWVRQAPGKGLEWVSSINTRSSYIYYTDSVKGRFTISRDNAKNSLYLQMNSLRAEDTAVYYCARVRSEGYDFWSGYFPDAFDIWGQGTMVTVSS

SEQ ID NO: 1890 - protein, 21 aa, synthetic construct
  REGION 1..21: note = Synthetic
ARVRSEGYDFWSGYFPDAFDI

SEQ ID NO: 1891 - protein, 108 aa, synthetic construct
  REGION 1..108: note = Synthetic
EIVMTQSPATLSVSPGERATLSCRASQSVSSNLAWYQQRPGQAPRLLIYGASTRATGVPXRFSGSGSGTEFTLTISSLQSEDFAVYYCQQYYNWPPWTFGQGTKLEIK

SEQ ID NO: 1892 - protein, 10 aa, synthetic construct
  REGION 1..10: note = Synthetic
QQYYNWPPWT

SEQ ID NO: 1893 - protein, 126 aa, synthetic construct; identical to SEQ ID NO: 351
  REGION 1..126: note = Synthetic

SEQ ID NO: 1894 - protein, 19 aa, synthetic construct
  REGION 1..19: note = Synthetic
ARTSYSDFWSGYYPDAFDI

SEQ ID NO: 1895 - protein, 108 aa, synthetic construct
  REGION 1..108: note = Synthetic
EIVMTQSPATLSVSPGERATLSCRXXQSVSSNLAWYQQKPGQAPRLLIYGASTRATGIPARFSGSGSGTEFSLTISSLQSEDFAVYYCQQYYNWPPWTFGQGTKVEIK

SEQ ID NO: 1896 - protein, 10 aa, synthetic construct
  REGION 1..10: note = Synthetic
QQYYNWPPWT

SEQ ID NO: 1897 - protein, 123 aa, synthetic construct; identical to SEQ ID NO: 365
  REGION 1..123: note = Synthetic

SEQ ID NO: 1898 - protein, 15 aa, synthetic construct
  REGION 1..15: note = Synthetic
ARYVRGYSLDDAFDI

SEQ ID NO: 1899 - protein, 107 aa, synthetic construct; identical to SEQ ID NO: 366
  REGION 1..107: note = Synthetic

SEQ ID NO: 1900 - protein, 9 aa, synthetic construct
  REGION 1..9: note = Synthetic
LQYNSYPLT

SEQ ID NO: 1901 - protein, 123 aa, synthetic construct; identical to SEQ ID NO: 371
  REGION 1..123: note = Synthetic

SEQ ID NO: 1902 - protein, 16 aa, synthetic construct
  REGION 1..16: note = Synthetic
ASPRGSSAYYQHALDY

SEQ ID NO: 1903 - protein, 107 aa, synthetic construct; identical to SEQ ID NO: 372
  REGION 1..107: note = Synthetic

SEQ ID NO: 1904 - protein, 9 aa, synthetic construct
  REGION 1..9: note = Synthetic
QHYDNLPNT

SEQ ID NO: 1905 - protein, 121 aa, synthetic construct; identical to SEQ ID NO: 339
  REGION 1..121: note = Synthetic

SEQ ID NO: 1906 - protein, 14 aa, synthetic construct
  REGION 1..14: note = Synthetic
ARNGGYSGYAHLNY

SEQ ID NO: 1907 - protein, 109 aa, synthetic construct; identical to SEQ ID NO: 340
  REGION 1..109: note = Synthetic

SEQ ID NO: 1908 - protein, 10 aa, synthetic construct
  REGION 1..10: note = Synthetic
QQYGSSPTWT

SEQ ID NO: 1909 - protein, 133 aa, synthetic construct; identical to SEQ ID NO: 373
  REGION 1..133: note = Synthetic

SEQ ID NO: 1910 - protein, 26 aa, synthetic construct
  REGION 1..26: note = Synthetic
ARGGYGSGSYYNVGFSDYFNVGFSDY

SEQ ID NO: 1911 - protein, 108 aa, synthetic construct; identical to SEQ ID NO: 374
  REGION 1..108: note = Synthetic

SEQ ID NO: 1912 - protein, 10 aa, synthetic construct
  REGION 1..10: note = Synthetic
QQYYNWPPWT

SEQ ID NO: 1913 - protein, 127 aa, synthetic construct; identical to SEQ ID NO: 343
  REGION 1..127: note = Synthetic

SEQ ID NO: 1914 - protein, 20 aa, synthetic construct
  REGION 1..20: note = Synthetic
ARVKAHYYDSSGYYPNYIDY

SEQ ID NO: 1915 - protein, 108 aa, synthetic construct; identical to SEQ ID NO: 344
  REGION 1..108: note = Synthetic

SEQ ID NO: 1916 - protein, 10 aa, synthetic construct
  REGION 1..10: note = Synthetic
QQYYNWPPWT

SEQ ID NO: 1917 - protein, 123 aa, synthetic construct
  REGION 1..123: note = Synthetic
EVQLVESGGGLVQPGGSLRLSCAASGFTVSTNYMNWVRQAPGKGLELVSVIYSGGSTYYADSVKGRFTISRDNSKNTLYLQMNSLRAEDTAVYYCARRPFYGDYVYYYGMDVWGQGTTVTVSS

SEQ ID NO: 1918 - protein, 17 aa, synthetic construct
  REGION 1..17: note = Synthetic
ARRPFYGDYVYYYGMDV

SEQ ID NO: 1919 - protein, 109 aa, synthetic construct
  REGION 1..109: note = Synthetic
EIVLTQSPGTLSLSPGERATLSCRASQTVSSNYLAWYQQKPGQAPRLLIYGASSRATGIPDRFSGSGSGTDFTLTISRLEPEDFAVYYCQQYGSSPLLTFGGGTKVEIK

SEQ ID NO: 1920 - protein, 10 aa, synthetic construct
  REGION 1..10: note = Synthetic
QQYGSSPLLT

SEQ ID NO: 1921 - protein, 122 aa, synthetic construct; identical to SEQ ID NO: 355
  REGION 1..122: note = Synthetic

SEQ ID NO: 1922 - protein, 15 aa, synthetic construct
  REGION 1..15: note = Synthetic
ARDGYNWNDRGYFDY

SEQ ID NO: 1923 - protein, 107 aa, synthetic construct
  REGION 1..107: note = Synthetic
AIQMTQSPSSLSASVGDRVTITCRASQGIRNDLGWYQQKPGKAPKLLIYGTSSLQSGVPSRFSGSGSGTDFTLTISSLQPEDFATYYCLQDYNYPRTFGQGTKVEIK

SEQ ID NO: 1924 - protein, 9 aa, synthetic construct
  REGION 1..9: note = Synthetic
LQDYNYPRT

SEQ ID NO: 1925 - protein, 124 aa, synthetic construct; identical to SEQ ID NO: 391
  REGION 1..124: note = Synthetic

SEQ ID NO: 1926 - protein, 17 aa, synthetic construct
  REGION 1..17: note = Synthetic
VKGERIIMLAVVTFLDY

SEQ ID NO: 1927 - protein, 110 aa, synthetic construct
  REGION 1..110: note = Synthetic
QFVLTQPPSVSAAPGQKVTVSCSGSSSNIGKNYVSWFQQLPGTAPKLLIYDNNKRPSGNPDRFSGSKSGTSATLGITGLQTGDEADYYCGTWDSSLSVYVFGTGTKVTVL

SEQ ID NO: 1928 - protein, 11 aa, synthetic construct
  REGION 1..11: note = Synthetic
GTWDSSLSVYV

SEQ ID NO: 1929 - protein, 121 aa, synthetic construct
  REGION 1..121: note = Synthetic
QVQLVQSGAEVKKPGASVKVSCKVSGYTLPEISIHWVRQAPGKGLEWMGGFDPEDGETIYAQKFQGRVTMTEDTSTDTAYMELGSLRSEDTAVYYCAAGTAFHRGGWFHPWGQGTQVTVSS

SEQ ID NO: 1930 - protein, 14 aa, synthetic construct
  REGION 1..14: note = Synthetic
AAGTAFHRGGWFHP

SEQ ID NO: 1931 - protein, 109 aa, synthetic construct
  REGION 1..109: note = Synthetic
QFVLTQPPSVSAAPGQKVTFSCSGSSSNIGNNYVSWYRHLPGTAPKLLIYENDKRPPGIPDRFSGSKSGTSATLGITGLQTGDEADYYCGTWDSLSAGVVFGGGTKLTV

SEQ ID NO: 1932 - protein, 11 aa, synthetic construct
  REGION 1..11: note = Synthetic
GTWDSLSAGVV

SEQ ID NO: 1933 - protein, 127 aa, synthetic construct
  REGION 1..127: note = Synthetic
EVQLVESGGGLVKPGGSLRLSCAASGFTFSSYTMNWVRQAPGKGLEWISSISSSSSFIYYADSVKGRFTISRDNVKNSLSLQMKSLRVEDTAVYYCAREPPSYSGVAWASEYYFDFWGQGALVTVSS

SEQ ID NO: 1934 - protein, 20 aa, synthetic construct
  REGION 1..20: note = Synthetic
AREPPSYSGVAWASEYYFDF

SEQ ID NO: 1935 - protein, 112 aa, synthetic construct
  REGION 1..112: note = Synthetic
QFVLTQPASVSGSPGQSITLSCTGTSTDIGTYNLVSWYQHHPGKAPKLIIYEVNKRPSGVSNRFSGSKSGNTASLTISGLQAEDESDYYCCSYAGSSHTYVVFGGGTKLTVL

SEQ ID NO: 1936 - protein, 12 aa, synthetic construct
  REGION 1..12: note = Synthetic
CSYAGSSHTYVV

SEQ ID NO: 1937 - protein, 112 aa, synthetic construct
  REGION 1..112: note = Synthetic
QVQLVQSGAEVKKPGASVKVSCKVSGYIFNELSMYWVRQAPGKGLEWMGGCDLEDGETXYAQKFQGRVTMTEDTSTDTAYMEVSSLRFDDTAVYYCATEGVWGQGTLVTVSS

SEQ ID NO: 1938 - protein, 5 aa, synthetic construct
  REGION 1..5: note = Synthetic
ATEGV

SEQ ID NO: 1939 - protein, 108 aa, synthetic construct
  REGION 1..108: note = Synthetic
SYVLTQPPSVSVSPGQTARITCSGDALPIKYAFWYQQKSGQAPVLVIYEDTKRPSGIPERFSGSSSGTMATLTISGAQVDDEADYYCYSTDSSGNHWVFGGGTKLTVL

SEQ ID NO: 1940 - protein, 11 aa, synthetic construct
  REGION 1..11: note = Synthetic
YSTDSSGNHWV

SEQ ID NO: 1941 - protein, 121 aa, synthetic construct
  REGION 1..121: note = Synthetic
QVQLVQSGAEVKKPGASVKVSCKVSGYTLVELSIHWVRQTPGKGLEWMGGFDPDDVKMIYAQKFQGRVTMTEDTSTDTAYMELSNLTSEDTAVYYCATGTAVVTPKWFDPWGQGTLVTVSS

SEQ ID NO: 1942 - protein, 14 aa, synthetic construct
  REGION 1..14: note = Synthetic
ATGTAVVTPKWFDP

SEQ ID NO: 1943 - protein, 110 aa, synthetic construct
  REGION 1..110: note = Synthetic
QFVLTQPPSVSAAPGQKVTISCSGSSSNIGNNYVSWYQQLPGTAPKVLIYENNKRPSGIPDRFSGSKSGTSATLGITGLQTGDEADYYCGTWDSSLSAGVFGGGTKLTVL

SEQ ID NO: 1944 - protein, 11 aa, synthetic construct
  REGION 1..11: note = Synthetic
GTWDSSLSAGV

SEQ ID NO: 1945 - protein, 122 aa, synthetic construct
  REGION 1..122: note = Synthetic
QLQLQESGPGLVKPSEILSLICTVSGGSINTDNYYWGWIRQPPGKGLEWIGTIYYSGSTFYNPSLRSRVAISVDTSKNQFSLRLSSVTAADTAVYYCARRPVVTAPYTFDYWGQGTLVTVSS

SEQ ID NO: 1946 - protein, 14 aa, synthetic construct
  REGION 1..14: note = Synthetic
ARRPVVTAPYTFDY

SEQ ID NO: 1947 - protein, 109 aa, synthetic construct
  REGION 1..109: note = Synthetic
QFVLTQPASVSGSPGQSITISCTGTSSDIGSYKLVSWYQHHQDKAPKILIFDVSKRPSGVSGRFSGSKSGNTASLTISGFQAEDEXDYYCCTYAGATTMFGGGTKVSVL

SEQ ID NO: 1948 - protein, 9 aa, synthetic construct
  REGION 1..9: note = Synthetic
CTYAGATTM

SEQ ID NO: 1949 - protein, 128 aa, synthetic construct; identical to SEQ ID NO: 385
  REGION 1..128: note = Synthetic

SEQ ID NO: 1950 - protein, 21 aa, synthetic construct
  REGION 1..21: note = Synthetic
ARELPPLLRYFDWLSSWAFDI

SEQ ID NO: 1951 - protein, 110 aa, synthetic construct
  REGION 1..110: note = Synthetic
QFVLTQPPSASGSPGQSVTISCTGTSSDVGGYNYVSWYQQHPGKAPKLMIYEVTKRPSGVPDRFSGSKSGNTASLTVSGLQAEDESDYYCSSYAGTNNYVFGTGTKVTVL

SEQ ID NO: 1952 - protein, 10 aa, synthetic construct
  REGION 1..10: note = Synthetic
SSYAGTNNYV

SEQ ID NO: 1953 - protein, 121 aa, synthetic construct
  REGION 1..121: note = Synthetic
QVQLVQSGAEVKKPGASVKVSCKASGYTFTSFGVSWVRQAPGQGLEWMGWINTDNGDTNYAQKVQGRVTMTTDTFTSTAYMELRSLRSDDTAVYYCAILEMSTLDNALDIWGQGTVVTVSS

SEQ ID NO: 1954 - protein, 14 aa, synthetic construct
  REGION 1..14: note = Synthetic
AILEMSTLDNALDI

SEQ ID NO: 1955 - protein, 108 aa, synthetic construct
  REGION 1..108: note = Synthetic
SYVLTQPPSVSVSPGQTARITCSGDALPKKYAYWYQQKSGQAPVLVIYEDNKRPSGIPERFSGSSSGTMATLTIIRAQVEDEADYYCYSPDSSGDSYVFGSGTKVTVL

SEQ ID NO: 1956 - protein, 11 aa, synthetic construct
  REGION 1..11: note = Synthetic
YSPDSSGDSYV

SEQ ID NO: 1957 - protein, 121 aa, synthetic construct
  REGION 1..121: note = Synthetic
QVQLVQSGAEVKKPGASVKVSCKVSGYNLIEVSMHWVRQAPGKGLEWMGGFDPEDPETIYAQNFQGRVTMTEDTSTDTAYMELSSLRPEDTAVYYCAGRFAYHGSGSPDYWGQGTQVTVSS

SEQ ID NO: 1958 - protein, 14 aa, synthetic construct
  REGION 1..14: note = Synthetic
AGRFAYHGSGSPDY

SEQ ID NO: 1959 - protein, 110 aa, synthetic construct
  REGION 1..110: note = Synthetic
QFVLTQPPSVSAAPGQKVTISCSGSSSNIGNNPVSWYHHLPGTAPKLLIYDNNKRPSGIPDRFSGSKSGTSATLGITGLQAGDEADYYCGTSDSSLRGVVFGGGTKLTVL

SEQ ID NO: 1960 - protein, 11 aa, synthetic construct
  REGION 1..11: note = Synthetic
GTSDSSLRGVV

SEQ ID NO: 1961 - protein, 123 aa, synthetic construct
  REGION 1..123: note = Synthetic
EVQLLESGGHLVQPGGSLRLSCAASGFTFSFYAMTWVRQAPGEGLEWVSSLSGSGDTTYYADSVRGRFTISRDNLKNTLYLQMNSLRAEDTALYYCAKAVFGGKEYYYGLDVWGQGTTVSVSS

SEQ ID NO: 1962 - protein, 16 aa, synthetic construct
  REGION 1..16: note = Synthetic
AKAVFGGKEYYYGLDV

SEQ ID NO: 1963 - protein, 110 aa, synthetic construct
  REGION 1..110: note = Synthetic
QSVLTQEPSLSVSPGGTVTLTCGLSSGSVSTDYHPTWYQQSPGQSPRTLIFDTNTRSSGVPARFSGFILGNKAALIITGAQADDESDYYCVLYMGSGISVFGGGTKLTVL

SEQ ID NO: 1964 - protein, 10 aa, synthetic construct
  REGION 1..10: note = Synthetic
VLYMGSGISV

SEQ ID NO: 1965 - protein, 123 aa, synthetic construct
  REGION 1..123: note = Synthetic
EVQLLESGGGLVQPGGSLRLSCAASGFTFTSYAMSWVRQAPGKGLEWVSGISVSGGSTYYADSVKGRFTISRDNSKNTVYLQMNSLRAEDTAVYYCAKDLFTGITMIAVVWDWGQGTLVTVSS

SEQ ID NO: 1966 - protein, 16 aa, synthetic construct
  REGION 1..16: note = Synthetic
AKDLFTGITMIAVVWD

SEQ ID NO: 1967 - protein, 111 aa, synthetic construct
  REGION 1..111: note = Synthetic
QFVLTQPPSVSAAPGHKVTISCSGSSSNIGNNYVSWYQQLPGTAPKLLIYENNKRPSGIPDRFSGSKSGTSATLGITGLQTGDEADYYCGTWDSSLSASYVFGTGTKVTVL

SEQ ID NO: 1968 - protein, 12 aa, synthetic construct
  REGION 1..12: note = Synthetic
GTWDSSLSASYV

SEQ ID NO: 1969 - protein, 128 aa, synthetic construct
  REGION 1..128: note = Synthetic
QVQLVQSGAEIKKPGASVKVSCKVSGYTLIEVSIHWVRQAPGKGLEWMGGFHPEDAETIYAQRFQGRVTMTEDTSTDTAYMQLSSLTSDDTAVYYCAAGIAVTGTPSEYSYHYALDVWGQGTTVTVSS

SEQ ID NO: 1970 - protein, 21 aa, synthetic construct
  REGION 1..21: note = Synthetic
AAGIAVTGTPSEYSYHYALDV

SEQ ID NO: 1971 - protein, 111 aa, synthetic construct
  REGION 1..111: note = Synthetic
QFVLTQPPSASGTPGQRVTIACSGSTSNIGRNDVSWYLQLPGTTPKLLIYRNNQRPSGVPDRFSGSKSGTSASLAISGLRSEDEADYYCAAWDDSLTRGVVFGGGTKLTVL

SEQ ID NO: 1972 - protein, 12 aa, synthetic construct
  REGION 1..12: note = Synthetic
AAWDDSLTRGVV

SEQ ID NO: 1973 - protein, 119 aa, synthetic construct
  REGION 1..119: note = Synthetic
EVQLLESGGGLVQPGGSLRLSCAASGFTALSWVRQAPGKGLEWVSTISVTGGSTYYADSVKGRFTISRDNSEITLSLQMNSLRAEDTAVYYCAKGGNSGITADDYFAYWGQGTLVTVSS

SEQ ID NO: 1974 - protein, 16 aa, synthetic construct
  REGION 1..16: note = Synthetic
AKGGNSGITADDYFAY

SEQ ID NO: 1975 - protein, 111 aa, synthetic construct
  REGION 1..111: note = Synthetic
QSVLTQPPSVSGAPGQRVTISCSGTSSNIGAGYDVHWYQQLPGTAPKLLIYYNTNRPSGVPDRFSGSKSGTSASLAITGLQAEDEADYYCQSYDSSLSAVVFGGGTKLTVL

SEQ ID NO: 1976 - protein, 11 aa, synthetic construct
  REGION 1..11: note = Synthetic
QSYDSSLSAVV

SEQ ID NO: 1977 - protein, 124 aa, synthetic construct; identical to SEQ ID NO: 387
  REGION 1..124: note = Synthetic

SEQ ID NO: 1978 - protein, 17 aa, synthetic construct
  REGION 1..17: note = Synthetic
ARDRPGSSSWYEFGFDY

SEQ ID NO: 1979 - protein, 108 aa, synthetic construct; identical to SEQ ID NO: 1771
  REGION 1..108: note = Synthetic

SEQ ID NO: 1980 - protein, 11 aa, synthetic construct
  REGION 1..11: note = Synthetic
QVWDSSSDHVV

SEQ ID NO: 1981 - protein, 121 aa, synthetic construct
  REGION 1..121: note = Synthetic
QVQLVQSGAEVKKPGTSMTVSCKVSGYMLSDISLHWVRQPPGKGLEWMGGFDPENDEAIFTQKFQGRATMTEDTSTDTAYLELSSLRSEDTAVYYCQTFRVDTSGYYSDYWGQGTLVTVSS

SEQ ID NO: 1982 - protein, 14 aa, synthetic construct
  REGION 1..14: note = Synthetic
QTFRVDTSGYYSDY

SEQ ID NO: 1983 - protein, 108 aa, synthetic construct
  REGION 1..108: note = Synthetic
SYVLTQPPSVSVSPGQTARITCSGDALPKKYAYWYQQKSGQAPVLVMYEDTKRPSGISERFSGSSSGTMATLTISGAQVEDEADYYCYSIDIGGYRRVFGGGTQLTVL

SEQ ID NO: 1984 - protein, 11 aa, synthetic construct
  REGION 1..11: note = Synthetic
YSIDIGGYRRV

SEQ ID NO: 1985 - protein, 121 aa, synthetic construct
  REGION 1..121: note = Synthetic
QVQLVQSGAEVKKPGSSVKVSCKTSGGTFNSFAINWVRQAPGQGPEWMGRVIPVLEIANYAQKFQGRITITADKSTSTAYMELSSLTSEDTAIYYCARHHIAVAQPYFDYWGQGTQVTVSS

SEQ ID NO: 1986 - protein, 14 aa, synthetic construct
  REGION 1..14: note = Synthetic
ARHHIAVAQPYFDY

SEQ ID NO: 1987 - protein, 110 aa, synthetic construct
  REGION 1..110: note = Synthetic
QFVLTQPPSASGTPGQRVTISCSGSSSNIGSNTVNWYQHLPGTAPKLLMSSDDQRPSGVPARFSGSKSGTSASLAISGLRSEDEADYYCASWDDRLNGVVFGGGTKLTVL

SEQ ID NO: 1988 - protein, 11 aa, synthetic construct
  REGION 1..11: note = Synthetic
ASWDDRLNGVV

SEQ ID NO: 1989 - protein, 125 aa, synthetic construct
  REGION 1..125: note = Synthetic
EVQLVESGGGLVQPGGSLRLSCAASGFTFSNYEMNWVRQAPGKGLEWVSYIGDSGLSIDYADSVKGRFTISRDNAKNSLYLQMNSLRAEDTAVYYCAREARATQVWFRLWYFDLWGRGTLVTVSS

SEQ ID NO: 1990 - protein, 18 aa, synthetic construct
  REGION 1..18: note = Synthetic
AREARATQVWFRLWYFDL

SEQ ID NO: 1991 - protein, 110 aa, synthetic construct
  REGION 1..110: note = Synthetic
QFVLTQPPSASGSSGQSVTISCTATSSDIGGYNYVSWYQQHPGKAPKLMIYEVNKRPSGVPARFSGSKSGNTASLTVSGLQAEDESDYYCSSYAGGNIVVFGGGTKLAVL

SEQ ID NO: 1992 - protein, 10 aa, synthetic construct
  REGION 1..10: note = Synthetic
SSYAGGNIVV

SEQ ID NO: 1993 - protein, 127 aa, synthetic construct
  REGION 1..127: note = Synthetic
QVQLVESGGGVVQPGRSLRISCAASGFSFSNYGMHWVRQAPGKGLEWVALVSYDGSHKYYADSVKGRFTISRDNSKTTLSLQMNSLRPEDTAVYYCSKELMAGTTVAYHAYYGMDVWGQGTTVTVSS

SEQ ID NO: 1994 - protein, 20 aa, synthetic construct
  REGION 1..20: note = Synthetic
SKELMAGTTVAYHAYYGMDV

SEQ ID NO: 1995 - protein, 108 aa, synthetic construct
  REGION 1..108: note = Synthetic
SYVLTQPPSVSVSPGQTARITCSGDVFPRQYGYWYRQRPGQAPVLVMSKDTERPSGIPERFSGASLGATVMLTISGVQAEDEADYYCQSADNNGPFVVFGGGTKLTVL

SEQ ID NO: 1996 - protein, 11 aa, synthetic construct
  REGION 1..11: note = Synthetic
QSADNNGPFVV

SEQ ID NO: 1997 - protein, 122 aa, synthetic construct; identical to SEQ ID NO: 381
  REGION 1..122: note = Synthetic

SEQ ID NO: 1998 - protein, 15 aa, synthetic construct
  REGION 1..15: note = Synthetic
ARDFGYSYGRDGFDI

SEQ ID NO: 1999 - protein, 111 aa, synthetic construct
  REGION 1..111: note = Synthetic
QFVLTQPPSVSGAPGQRVTISCTGSSSNIGAGYDVHWYQQFPGTAPKFLISGNSYRPSGVPDRFSGSKSGTSASLAITGLQAEDEADYYCQSYDRSLSGWVFGGGTKLTVL

SEQ ID NO: 2000 - protein, 11 aa, synthetic construct
  REGION 1..11: note = Synthetic
QSYDRSLSGWV

SEQ ID NO: 2001 - protein, 123 aa, synthetic construct
  REGION 1..123: note = Synthetic
QVQLVESGGGVVQPGRSLRLSCAASGFTFSSYAMHWVRQAPGKGLEWVAVISYDGSKKDYADSVKGRFTISRDKSKNTLYLQMNSTRAEDTAVYYCARDDSLLYNSGGHFAYWGQGTLVTVSS

SEQ ID NO: 2002 - protein, 16 aa, synthetic construct
  REGION 1..16: note = Synthetic
ARDDSLLYNSGGHFAY

SEQ ID NO: 2003 - protein, 110 aa, synthetic construct
  REGION 1..110: note = Synthetic
QSVLTQPPSASGTPGQRVTISCSGSSSNIGGNYVYWYQQLPGTAPKLLIYRNNQRPSGVPDRFSGSKSGTSASLAISGLRSEDEADYYCVAWDDSLSGGVFGGGTKLTVL

SEQ ID NO: 2004 - protein, 11 aa, synthetic construct
  REGION 1..11: note = Synthetic
VAWDDSLSGGV

SEQ ID NO: 2005 - protein, 123 aa, synthetic construct
  REGION 1..123: note = Synthetic
EVQLVQSGAEVKKPGESLKISCKGSGFTFNNYWIGWVRQMPGKGLEWMGIIYPGDSDTRYSPSFRGQVTISADKSISTVYLQWSSLKASDTAVYYCARHYDSSGFNPVVFDSWGQGTLVTVSS

SEQ ID NO: 2006 - protein, 16 aa, synthetic construct
  REGION 1..16: note = Synthetic
ARHYDSSGFNPVVFDS

SEQ ID NO: 2007 - protein, 110 aa, synthetic construct
  REGION 1..110: note = Synthetic
QFVLTQPSSASGSPGQSVTISCTGTSSDVGGYNHVSWYQQHPGKAPKLMIYEVTKRPSGVPDRFSGSKSGNTASLTVSGLQAEDEADYYCSSYADNILYVFGTGTKVTVL

SEQ ID NO: 2008 - protein, 10 aa, synthetic construct
  REGION 1..10: note = Synthetic
SSYADNILYV

SEQ ID NO: 2009 - protein, 121 aa, synthetic construct; identical to SEQ ID NO: 407
  REGION 1..121: note = Synthetic

SEQ ID NO: 2010 - protein, 15 aa, synthetic construct
  REGION 1..15: note = Synthetic
ASVVDSTADPYYFHF

SEQ ID NO: 2011 - protein, 107 aa, synthetic construct
  REGION 1..107: note = Synthetic
SYVLTQPLSVSVALGQTARITCGGHKIGNKYVHWYQQKPGQAPVLVIYRDTSRPSGIPERFSGSKSENTATLTISGAQVGDEADYYCQVWDSSAPVVFGGGTDLTVL

SEQ ID NO: 2012 - protein, 10 aa, synthetic construct
  REGION 1..10: note = Synthetic
QVWDSSAPVV

SEQ ID NO: 2013 - protein, 121 aa, synthetic construct
  REGION 1..121: note = Synthetic
QVQLVQSGAEVKKPGSSVKVSCKASGGTFNSYAINWVRQAPGQGLEWMGRVIPMVGITNYAQKFQGRITITADKSTSTAYMELSSLRSEDTAVYYCARHHIAVAQPYFDYWAQGTLVTVSS

SEQ ID NO: 2014 - protein, 14 aa, synthetic construct
  REGION 1..14: note = Synthetic
ARHHIAVAQPYFDY

SEQ ID NO: 2015 - protein, 110 aa, synthetic construct
  REGION 1..110: note = Synthetic
QFVLTQPPSASGTPGQRVTISCSGSSSNIGSNTVNWYQHLPGTAPKLLMSSDDQRPSGVPDRFSGSKSGTSASLAISGLRSEDEAEYYCASWDDRLNGVVFGGGTKLTVL

SEQ ID NO: 2016 - protein, 11 aa, synthetic construct
  REGION 1..11: note = Synthetic
ASWDDRLNGVV

SEQ ID NO: 2017 - protein, 125 aa, synthetic construct
  REGION 1..125: note = Synthetic
EVQLVESGGGLVKPGGSLTLSCAASGFTFSSYTMNWVRQAPGKGLEWVSYISGPSNFIYYAASVRGRFTISRDNAKNSLYLQMNSLRDEDTAVYYCARVAQDFGVRGVLGYFHHWGQGALVTVSS

SEQ ID NO: 2018 - protein, 18 aa, synthetic construct
  REGION 1..18: note = Synthetic
ARVAQDFGVRGVLGYFHH

SEQ ID NO: 2019 - protein, 108 aa, synthetic construct
  REGION 1..108: note = Synthetic
EIVMTQSPATLSVSPGERVTLSCRASQSLNNYLAWYQQKPGQAPRLLIYAASTRATGIPARFSGSGSGTEFTLTISSLQSEDFAVYYCQQYNDLPPFTFGQGTRLEIK

SEQ ID NO: 2020 - protein, 10 aa, synthetic construct
  REGION 1..10: note = Synthetic
QQYNDLPPFT

SEQ ID NO: 2021 - protein, 129 aa, synthetic construct
  REGION 1..129: note = Synthetic
EVQLVESGGGLVKPGGSLRLSCGGSGFNFSDHKMNWVRQAPGKGLEWVSSISRSSDYKYYGDSAKGRFTISRDNAKNSLYLQMNSLRAEDTAVYYCARDNLISYYDSSGYFLLDAFDIWGHGTMVTVSS

SEQ ID NO: 2022 - protein, 22 aa, synthetic construct
  REGION 1..22: note = Synthetic
ARDNLISYYDSSGYFLLDAFDI

SEQ ID NO: 2023 - protein, 112 aa, synthetic construct
  REGION 1..112: note = Synthetic
DIVMTQSPXPLAVSLGERATINCKSSQSVLYRSNNKHFLAWYQQKPGQPPKLLIFWASTRASGVPDRFSGSGSGTDFTLTISSLQAEDVAVYYCQQYYTAPITFGGGTKVEI

SEQ ID NO: 2024 - protein, 9 aa, synthetic construct
  REGION 1..9: note = Synthetic
QQYYTAPIT

SEQ ID NO: 2025 - protein, 133 aa, synthetic construct
  REGION 1..133: note = Synthetic
EVQLVESGGGLVQPGRSLRLSCAASGFTFDDYAMHWVRQAPGKGLEWVSGISWTSDIIGYADSVKGRFTISRDNAKDSLHLQMNSLRLEDTAIYYCAKDVNTREAVAGFLSALDNYYYGMDVWGQGTAVTVSS

SEQ ID NO: 2026 - protein, 26 aa, synthetic construct
  REGION 1..26: note = Synthetic
AKDVNTREAVAGFLSALDNYYYGMDV

SEQ ID NO: 2027 - protein, 112 aa, synthetic construct; identical to SEQ ID NO: 384
  REGION 1..112: note = Synthetic

SEQ ID NO: 2028 - protein, 9 aa, synthetic construct
  REGION 1..9: note = Synthetic
MQALQTPWT

SEQ ID NO: 2029 - protein, 126 aa, synthetic construct
  REGION 1..126: note = Synthetic
QVQLQESGPGLVKPSQTLSLTCSVSGGSINTGLYYWSWIRQHPGKGLEWIGYIYYSGSTFYNPSLRSRITISVDTSKNQFSLKLSSVTAADTAVYYCARESGDHGDYILNGYFDSWGQGTLVTVSS

SEQ ID NO: 2030 - protein, 18 aa, synthetic construct
  REGION 1..18: note = Synthetic
ARESGDHGDYILNGYFDS

SEQ ID NO: 2031 - protein, 113 aa, synthetic construct
  REGION 1..113: note = Synthetic
DIVMTQSPDSLAVSLGERATINCKSSQSVLYSSNNKNYLAWYQQKPGQPPKLLIYWASTRESGVPDRFSGSGSGTDFTLTISSLQAEDVAVYYCQQYYNTPRTFGQGTKVEIK

SEQ ID NO: 2032 - protein, 9 aa, synthetic construct
  REGION 1..9: note = Synthetic
QQYYNTPRT

SEQ ID NO: 2033 - protein, 123 aa, synthetic construct
  REGION 1..123: note = Synthetic
QLQLQESGPGPVKPSATLSLTCSVFGGSISSSTYYWGWIRQPPGKGLEWIGNIFYTGNAYYNPSLSSRVTMSVDTSKNQFSLKLSSVTAADTDVYYCAAYVYGYSYDEGFDVWGQGTTVTVFS

SEQ ID NO: 2034 - protein, 15 aa, synthetic construct
  REGION 1..15: note = Synthetic
AAYVYGYSYDEGFDV

SEQ ID NO: 2035 - protein, 107 aa, synthetic construct
  REGION 1..107: note = Synthetic
DIQMTQSPSSLSAPVGDRVTITCRASQGIRNDLGWYQQKPGNAPKRLIYGASSLQSGVPSRFSGSGSETEFTLTISSLQPEDFATYFCLQYNSYPLTFGGGTKVEIK

SEQ ID NO: 2036 - protein, 9 aa, synthetic construct
  REGION 1..9: note = Synthetic
LQYNSYPLT

SEQ ID NO: 2037 - protein, 121 aa, synthetic construct; identical to SEQ ID NO: 379
  REGION 1..121: note = Synthetic

SEQ ID NO: 2038 - protein, 14 aa, synthetic construct
  REGION 1..14: note = Synthetic
ARDGGFTGYAHLAY

SEQ ID NO: 2039 - protein, 109 aa, synthetic construct; identical to SEQ ID NO: 380
  REGION 1..109: note = Synthetic

SEQ ID NO: 2040 - protein, 10 aa, synthetic construct
  REGION 1..10: note = Synthetic
QQYGSSPTWT

SEQ ID NO: 2041 - protein, 122 aa, synthetic construct; identical to SEQ ID NO: 399
  REGION 1..122: note = Synthetic

SEQ ID NO: 2042 - protein, 15 aa, synthetic construct
  REGION 1..15: note = Synthetic
ANSDPTGYYWGLFDY

SEQ ID NO: 2043 - protein, 107 aa, synthetic construct; identical to SEQ ID NO: 400
  REGION 1..107: note = Synthetic

SEQ ID NO: 2044 - protein, 9 aa, synthetic construct
  REGION 1..9: note = Synthetic
LQHNSFPLT

SEQ ID NO: 2045 - protein, 125 aa, synthetic construct
  REGION 1..125: note = Synthetic
QVQLQESGPGLVKPSQTLSLTCTVSGGSITNDHFYWTWIRQHPGKGLEWIGYVYDSGNTHYNPSLKSRVTISVDTSENQFSLRLTSVTAADTAMYYCARGRDVPIIVVPDAFDIWGPGTMVTVSA

SEQ ID NO: 2046 - protein, 17 aa, synthetic construct
  REGION 1..17: note = Synthetic
ARGRDVPIIVVPDAFDI

SEQ ID NO: 2047 - protein, 109 aa, synthetic construct
  REGION 1..109: note = Synthetic
EIVLTQSPXSLSLSPGERATLSCRASQSVNSYLAWYQQKPGQAPMLLIYDTSNRATGIPARFSGSRSGTDFTLTISSLEPEDFALYYCQQRSNWPPTYTFGQGTKLEIK

SEQ ID NO: 2048 - protein, 11 aa, synthetic construct
  REGION 1..11: note = Synthetic
QQRSNWPPTYT

SEQ ID NO: 2049 - protein, 123 aa, synthetic construct; identical to SEQ ID NO: 377
  REGION 1..123: note = Synthetic

SEQ ID NO: 2050 - protein, 15 aa, synthetic construct
  REGION 1..15: note = Synthetic
ASYFYGYSYDEAFDN

SEQ ID NO: 2051 - protein, 106 aa, synthetic construct; identical to SEQ ID NO: 378
  REGION 1..106: note = Synthetic

SEQ ID NO: 2052 - protein, 9 aa, synthetic construct
  REGION 1..9: note = Synthetic
LQYNSYPLT

SEQ ID NO: 2053 - protein, 124 aa, synthetic construct
  REGION 1..124: note = Synthetic
QVQLQESGPGLVKPSQTLSLTCTVSGAYISSGGDYWSWIRQHPGKGLEWIGYIYYSGHTYYNPSLKSRVTISVDTSKNQFSLKLTSVTAADTAVYYCARADDYGDFGAGFFDSWGLGTLVTVSS

SEQ ID NO: 2054 - protein, 16 aa, synthetic construct
  REGION 1..16: note = Synthetic
ARADDYGDFGAGFFDS

SEQ ID NO: 2055 - protein, 112 aa, synthetic construct
  REGION 1..112: note = Synthetic
DIVMTQSPDSLSVSPGERATINCKSSQSVYYTSNNKNYLAWYQQKPGQPPKLLISWASTRESWVPDRFSGSGSGTDFTLTISSLQAEDVAVYYCQQYHSTLSFGPGTKVDIK

SEQ ID NO: 2056 - protein, 8 aa, synthetic construct
  REGION 1..8: note = Synthetic
QQYHSTLS

SEQ ID NO: 2057 - protein, 117 aa, synthetic construct
  REGION 1..117: note = Synthetic
EVQLLESGGGLVQPGGSLRLSCAASGFTFSTSAMSWVRQAPGKGLEWVSGISSSGGSTYYADSVKGRFTISRDNSKNTLYLQMNLLRAEDTAVYYCAKAGDWFPDYWGQGTLVTVSS

SEQ ID NO: 2058 - protein, 10 aa, synthetic construct
  REGION 1..10: note = Synthetic
AKAGDWFPDY

SEQ ID NO: 2059 - protein, 108 aa, synthetic construct
  REGION 1..108: note = Synthetic
DIQMTQSPSSLSASVGDRVTITCRASQGIRNDLDWYQQKPGKAPKRLIYAASSLQSGVPSRFSGSGSGTEFTLTISSLQPEDFATYYCLQHNTYPLLTFGGGTKVEIK

SEQ ID NO: 2060 - protein, 10 aa, synthetic construct
  REGION 1..10: note = Synthetic
LQHNTYPLLT

SEQ ID NO: 2061 - protein, 129 aa, synthetic construct
  REGION 1..129: note = Synthetic
QVQLVESGGGVVQPGRSLRLSCAASGFTFSNFPMHWVRQAPGKGLEWVALISYDGSDEYFADSVRGRFTISRDNSKNTLYLQMNSLRVEDTAMYYCARDQPFCSGDNCYLTEDFVLDYWGQGTLVTVSS

SEQ ID NO: 2062 - protein, 22 aa, synthetic construct
  REGION 1..22: note = Synthetic
ARDQPFCSGDNCYLTEDFVLDY

SEQ ID NO: 2063 - protein, 106 aa, synthetic construct
  REGION 1..106: note = Synthetic
DIQMTQSPSSLSASVGDRVTITCRASHSIGSYLNWYQQKPGKAPKLLIYAASSLQTGVPSRFSGSGSGTDFIFTISSLQPEDFATFYCQQSHSFPPAFGQGTKVEI

SEQ ID NO: 2064 - protein, 9 aa, synthetic construct
  REGION 1..9: note = Synthetic
QQSHSFPPA

SEQ ID NO: 2065 - protein, 120 aa, synthetic construct; identical to SEQ ID NO: 409
  REGION 1..120: note = Synthetic

SEQ ID NO: 2066 - protein, 15 aa, synthetic construct
  REGION 1..15: note = Synthetic
ARDYGDGNFRSYFDY

SEQ ID NO: 2067 - protein, 107 aa, synthetic construct
  REGION 1..107: note = Synthetic
EIVMTQSPATLSVSPGERATLSCRASQSVSSNLAWYQQKPGQAPRLLIYGASTRATGIPARFSGSGSGTEFTLTISSLQSEDFAVYYCQQYNSWPRAFGLGTKVEFK

SEQ ID NO: 2068 - protein, 9 aa, synthetic construct
  REGION 1..9: note = Synthetic
QQYNSWPRA

SEQ ID NO: 2069 - protein, 115 aa, synthetic construct
  REGION 1..115: note = Synthetic
EVQLVESGGGLVQPGGSLRLSCSASGFTFSSSPMHWVRQAPRKGLEYVSAISTNGASTYYAASVKGRFTISRDNSKNTLYLQMSRLRAEDTAVYYCVKDYYGDNWGQGTLVTVSS

SEQ ID NO: 2070 - protein, 8 aa, synthetic construct
  REGION 1..8: note = Synthetic
VKDYYGDN

SEQ ID NO: 2071 - protein, 108 aa, synthetic construct
  REGION 1..108: note = Synthetic
EIVMTQSPATLSVSPGERATLSCRASQSVGSNLAWYRQKPGQAPRLVIYGASTRATGIPARFSGSGSGTEFTLTISSLQSEDFAVYYCQHYNNWPPWTFGQGTKVEIK

SEQ ID NO: 2072 - protein, 10 aa, synthetic construct
  REGION 1..10: note = Synthetic
QHYNNWPPWT

SEQ ID NO: 2073 - protein, 119 aa, synthetic construct
  REGION 1..119: note = Synthetic
EVQLLESGGGLVQPGGSLRLSCAASGSEFTFGNHVMNWVRQAPGKGLEWVSSISSSGGKTYYIDSVKGRFTISRDNSKNTLYLQMNTLRADDTAVYYCAKLGDYWPDYWGQGTLVTVSS

SEQ ID NO: 2074 - protein, 10 aa, synthetic construct
  REGION 1..10: note = Synthetic
AKLGDYWPDY

SEQ ID NO: 2075 - protein, 108 aa, synthetic construct
  REGION 1..108: note = Synthetic
DIQMTQSPSSLSASVGDRVTITCRASQGIRNDLGWYQQKPGKAPKRLIYPASTLQSGVPSRFSGSGSGTEFTLTISSLQPEDFATYYCLQHNTYPVFSFGPGTKVEIE

SEQ ID NO: 2076 - protein, 10 aa, synthetic construct
  REGION 1..10: note = Synthetic
LQHNTYPVFS

SEQ ID NO: 2077 - protein, 118 aa, synthetic construct
  REGION 1..118: note = Synthetic
EVQLLESGGGLVQPGGSQRLSCVGSGFTFTNFAMAWVRQAPGKGLEWVSGISGSGGSTYHADSVKGRFTISRDNSKSTLYLQMNSLRAEDTAVYYCARDYGDYEFDYWGQGTLVTVSS

SEQ ID NO: 2078 - protein, 11 aa, synthetic construct
  REGION 1..11: note = Synthetic
ARDYGDYEFDY

SEQ ID NO: 2079 - protein, 107 aa, synthetic construct
  REGION 1..107: note = Synthetic
EIVLTQSPATLSLSPGERATLSCRASQSVSSYLAWYQQKPGQAPRLLIYDASNRATGIPARFSGSGSGTDFTLTISSLEPEDFAVYYCQQRSNWPFTFGPGTKVDIK

SEQ ID NO: 2080 - protein, 9 aa, synthetic construct
  REGION 1..9: note = Synthetic
QQRSNWPFT

SEQ ID NO: 2081 - protein, 127 aa, synthetic construct
  REGION 1..127: note = Synthetic
QVQLVESGGGVVQPGRSLTLSCIVSGFTFSSYGMHWVRQAPGKGLEWVTFISYDGSNEYYGDSVKGRFTISRDNSKNTVYLQMNSLRTEDTAMYYCAKDPGGEGDNGAFEAFYFDYWGQGTLVTVSS

SEQ ID NO: 2082 - protein, 20 aa, synthetic construct
  REGION 1..20: note = Synthetic
AKDPGGEGDNGAFEAFYFDY

SEQ ID NO: 2083 - protein, 107 aa, synthetic construct
  REGION 1..107: note = Synthetic
DIQMTQSPSSLSASVGDRVTITCQASQSISIYLNWYQRKPGKALKLLIYAASNLQSGVPSRFSGSDSGTDFTLTISSLQPEDFATYYCQQSYIFPPTFGQGTQVEIK

SEQ ID NO: 2084 - protein, 9 aa, synthetic construct
  REGION 1..9: note = Synthetic
QQSYIFPPT

SEQ ID NO: 2085 - protein, 121 aa, synthetic construct
  REGION 1..121: note = Synthetic
QVQLVESGGGVVQPGRSLRLSCAASGFTFSSYGMHWVRQAPGKGLEWVAGIYYDGSNEYYADSVKGRFTISRDNSRNTLYLQMNSLRAEDTAVFYCARDRGFTGYAHFDCWGQGTLVTVSS

SEQ ID NO: 2086 - protein, 14 aa, synthetic construct
  REGION 1..14: note = Synthetic
ARDRGFTGYAHFDC

SEQ ID NO: 2087 - protein, 109 aa, synthetic construct
  REGION 1..109: note = Synthetic
EIVLTQSPGTLSLSPGERATLSCRASQSVTSSYLAWYQQKPGQAPRLLIYGTSSRATGIPDRFSGSGSWTDFTLTISRLEPEDFAVYYCQQYGSSPSWTFGQGTKVEIK

SEQ ID NO: 2088 - protein, 10 aa, synthetic construct
  REGION 1..10: note = Synthetic
QQYGSSPSWT

SEQ ID NO: 2089 - protein, 123 aa, synthetic construct
  REGION 1..123: note = Synthetic
QLQLQESGPGLVKPSETLSLTCSVSGASISSNTYYWGWIRQPPGKGLEWIGNIFYTGNTYYNPSLESRVTMSVDPSKNQFSLKLNSVTAADTAVYYCASYFYGYSYDAGYDFWGKGTMVTISS

SEQ ID NO: 2090 - protein, 15 aa, synthetic construct
  REGION 1..15: note = Synthetic
ASYFYGYSYDAGYDF

SEQ ID NO: 2091 - protein, 107 aa, synthetic construct
  REGION 1..107: note = Synthetic
DIQMTQSPSSLSASVGDRVTITCRASQGIRNDLGWYQQKPGKAPKRLIYAASNLQSGVPSRFGGSGSGTEFTLTISSLQPEDFATYYCLQYNSYPLTFGGGTKVEIK

SEQ ID NO: 2092 - protein, 9 aa, synthetic construct
  REGION 1..9: note = Synthetic
LQYNSYPLT

SEQ ID NO: 2093 - protein, 123 aa, synthetic construct
  REGION 1..123: note = Synthetic
QVQLVESGGGVVQPGRSLRLSCAASGFSFSSYGMHWVRQAPGKGLEWVTVISYDGSNTYYADSVKGRFTISRDNSKNTLYLQMNSLRTEDTAVYYCANEALSSGYEFPYFDYWGQGTLVTVSS

SEQ ID NO: 2094 - protein, 16 aa, synthetic construct
  REGION 1..16: note = Synthetic
ANEALSSGYEFPYFDY

SEQ ID NO: 2095 - protein, 107 aa, synthetic construct
  REGION 1..107: note = Synthetic
AIRMTQSPSSFSASTGDRVTITCRASQGISSYLAWYQQKPGKAPKLLIYTASTLESGVPSRFSGSGAGTDFTLTISGLQSEDFASYYCQQYYSYPITFGQGTRLEIK

SEQ ID NO: 2096 - protein, 9 aa, synthetic construct
  REGION 1..9: note = Synthetic
QQYYSYPIT

SEQ ID NO: 2097 - protein, 121 aa, synthetic construct
  REGION 1..121: note = Synthetic
QVQLVESGGGVVQPGRSLRLSCAASGFTFSSFGMHWVRQAPGKGLEWVAGIFFDGSKKNYADSVKGRFTISRDNSKNTLSLEMTSLRVEDTALYYCARDRGFTGYAHFDLWGQGTLVTVSS

SEQ ID NO: 2098 - protein, 14 aa, synthetic construct
  REGION 1..14: note = Synthetic
ARDRGFTGYAHFDL

SEQ ID NO: 2099 - protein, 109 aa, synthetic construct
  REGION 1..109: note = Synthetic
EIVLTQSPGTLSLSPGERATLSCRASQIVTSSYLAWYQQKPGQAPRLLIYGTSSRATGIPDRFSGSGSGTDFTLTISRLEPEDFAVYYCQQYGTSPSWTFGQGTKVEIK

SEQ ID NO: 2100 - protein, 10 aa, synthetic construct
  REGION 1..10: note = Synthetic
QQYGTSPSWT

SEQ ID NO: 2101 - protein, 122 aa, synthetic construct; identical to SEQ ID NO: 413
  REGION 1..122: note = Synthetic

SEQ ID NO: 2102 - protein, 15 aa, synthetic construct
  REGION 1..15: note = Synthetic
AKGDTAMAKYNWFDP

SEQ ID NO: 2103 - protein, 107 aa, synthetic construct
  REGION 1..107: note = Synthetic
EIVLTQSPATLSLSPGERATLSCRASQSVSSYLAWYQQKPGQAPRLLIYDVSYRATGIPARFSGSGSGTDFTLTISSLEPEDFAVYYCQQRGTWPSTFGGGTKVEIK

SEQ ID NO: 2104 - protein, 9 aa, synthetic construct
  REGION 1..9: note = Synthetic
QQRGTWPST

SEQ ID NO: 2105 - protein, 124 aa, synthetic construct
  REGION 1..124: note = Synthetic
EVQLVESGGGLVQPGGSLTISCAASGFTFGDYAMHWVRQAPGKGLEWVSGISWNSNTKAYGDSAKGRFTISRDNAKNSLYLEMNSLRPEDTALYYCAKDRLSMSIFGVALFDYLGQGTLVTVSS

SEQ ID NO: 2106 - protein, 17 aa, synthetic construct
  REGION 1..17: note = Synthetic
AKDRLSMSIFGVALFDY

SEQ ID NO: 2107 - protein, 107 aa, synthetic construct
  REGION 1..107: note = Synthetic
AIQMTQSPSSLSASVGDRVTITCRASQGIRNDLGWYQQKPGKAPKLLIYTASSLQSGVPSRFSGSGSGTDFTLTISSLQPEDFATYYCLQGYNYPQTFGQGTRVEIK

SEQ ID NO: 2108 - protein, 9 aa, synthetic construct
  REGION 1..9: note = Synthetic
LQGYNYPQT

SEQ ID NO: 2109 - protein, 121 aa, synthetic construct
  REGION 1..121: note = Synthetic
QVQLVESGGGVVQPGRSLRLSCAASGFTFSSYGVHWVRQAPGKGLEWVALISYDGSDKYYADSVTGRFTISRDNSKNTLYLQMNNLRAEDTAVYYCAKESVTTYGLYFDYWGQGTLVTVSS

SEQ ID NO: 2110 - protein, 14 aa, synthetic construct
  REGION 1..14: note = Synthetic
AKESVTTYGLYFDY

SEQ ID NO: 2111 - protein, 107 aa, synthetic construct
  REGION 1..107: note = Synthetic
EIVLTQSPATLSLSPGERATLSCRASQGVSSYLAWYQQKPGQAPRLLIYDASNRATGIPARFSGSGSGTEFTLTISSLEPEDFAVYYCQQCSNWDLTFGGGTKVEIK

SEQ ID NO: 2112 - protein, 9 aa, synthetic construct
  REGION 1..9: note = Synthetic
QQCSNWDLT

SEQ ID NO: 2113 - protein, 128 aa, synthetic construct
  REGION 1..128: note = Synthetic
EVQLVESGGGLVKPGGSLRLSCAASGFTFSNYTMNWVRQAPGKGLEWVSSISGRGNYIYSADSVKGRFTISRDNAKNSLYLQMNSLRAEDTAVYFCAREDLHIYDFWSGYYPAQFDYWGQGTLVTVSS

SEQ ID NO: 2114 - protein, 21 aa, synthetic construct
  REGION 1..21: note = Synthetic
AREDLHIYDFWSGYYPAQFDY

SEQ ID NO: 2115 - protein, 108 aa, synthetic construct
  REGION 1..108: note = Synthetic
EIVMTQSPATLSVSPGERATLSCRASQSISNNLAWYQQKPGQAPRLLIYGASTRATGIPARFSGSGSGTEFTLTISSLQSEDFAVYYCQQYYNWPPWTFGQGTKVEIK

SEQ ID NO: 2116 - protein, 10 aa, synthetic construct
  REGION 1..10: note = Synthetic
QQYYNWPPWT

SEQ ID NO: 2117 - protein, 127 aa, synthetic construct
  REGION 1..127: note = Synthetic
QVQLVQSGAEVKKPGASVRVSCNVSGYTLIELSMHWVRQAPGKGLEWMGGFDFEDAETFYAQKFQGRVTMTEDTSTDTAYMELSSLRSEDTAVYYCATVLPPNYYDSSGYYRAFDYWGQGTLVTVSS

SEQ ID NO: 2118 - protein, 20 aa, synthetic construct
  REGION 1..20: note = Synthetic
ATVLPPNYYDSSGYYRAFDY

SEQ ID NO: 2119 - protein, 107 aa, synthetic construct
  REGION 1..107: note = Synthetic
DIQMTQSPSSLSASVGDRVTITCRASQGISNYLAWYQQKPGKVPKLLIYTASTLQSGVPSRFSGSGSGTDFTLTISSLQPEDVATYYCQKYNGASWTFGQGTKVEIK

SEQ ID NO: 2120 - protein, 9 aa, synthetic construct
  REGION 1..9: note = Synthetic
QKYNGASWT

SEQ ID NO: 2121 - protein, 125 aa, synthetic construct
  REGION 1..125: note = Synthetic
QVQLVESGGGVVQPGRSLRLSCAAAEFTFSTSGIHWVRQAPGKGLEWVALISNDGRVKYYGDSVKGRSTISRDNSNSTVFLHMNSLRAEDTATYYCATARGNTQNYFYYYGMDVWGQGTTVTVSS

SEQ ID NO: 2122 - protein, 18 aa, synthetic construct
  REGION 1..18: note = Synthetic
ATARGNTQNYFYYYGMDV

SEQ ID NO: 2123 - protein, 107 aa, synthetic construct
  REGION 1..107: note = Synthetic
AIQMTQSPSSLSASVGDRIIITCRASQGIRSDLGWYQQKPGKAPKLLISGASSLQSGVPSRFSGSGSGTDFTLTISSLQPEDFATYYCLQEYNYPLTFGGGTKVEIK

SEQ ID NO: 2124 - protein, 9 aa, synthetic construct
  REGION 1..9: note = Synthetic
LQEYNYPLT

SEQ ID NO: 2125 - protein, 126 aa, synthetic construct; identical to SEQ ID NO: 405
  REGION 1..126: note = Synthetic

SEQ ID NO: 2126 - protein, 19 aa, synthetic construct
  REGION 1..19: note = Synthetic
AKGGGDRRQTRFFLDVFDM

SEQ ID NO: 2127 - protein, 113 aa, synthetic construct; identical to SEQ ID NO: 406
  REGION 1..113: note = Synthetic

SEQ ID NO: 2128 - protein, 9 aa, synthetic construct
  REGION 1..9: note = Synthetic
QQYYLTPLT

SEQ ID NO: 2129 - protein, 121 aa, synthetic construct
  REGION 1..121: note = Synthetic
QVQLVESGGGVVQPGRSLRLSCAASGFIFSNYDMHWVRQAPGKGLEWVALVSDDGGNIFYADSVKGRFTISRDNSKSTLYLQMNSLRPEDTAVYYCAKDLETFGEFPLDYWGQGTLVTVSS

SEQ ID NO: 2130 - protein, 14 aa, synthetic construct
  REGION 1..14: note = Synthetic
AKDLETFGEFPLDY

SEQ ID NO: 2131 - protein, 107 aa, synthetic construct
  REGION 1..107: note = Synthetic
DIQMTQSPSTLSASVGDRVTITCRASQSINRWLAWYQQKPGNAPKLLIHEASSLVGVVPSRFSGSGSGTEFTLTISSLQPDDFATYYCQQYHTYSGTFGQGTKVEIK

SEQ ID NO: 2132 - protein, 9 aa, synthetic construct
  REGION 1..9: note = Synthetic
QQYHTYSGT

SEQ ID NO: 2133 - protein, 130 aa, synthetic construct
  REGION 1..130: note = Synthetic
QVQLVESGGGVVQPGRSLRLSCAASGFTFSSYALHWVRQAPGKGLEWVADISYDGSNENYADSVEGRFTISRDNSKNTLYLQMNSLRAADTAVYYCARDRVLRSFGDYHVPIVLYCFDYWGQGTLVTVSS

SEQ ID NO: 2134 - protein, 23 aa, synthetic construct
  REGION 1..23: note = Synthetic
ARDRVLRSFGDYHVPIVLYCFDY

SEQ ID NO: 2135 - protein, 107 aa, synthetic construct
  REGION 1..107: note = Synthetic
EIVMTQSPATLSVSPGERATLSCRASQSVSSNLAWYQQKPGQAPRLLIYDASTRAAGIPARFSGSESGTEFTLTISSLQSEDFAVYYCQQCHEWPPTFGQGTKVEIK

SEQ ID NO: 2136 - protein, 9 aa, synthetic construct
  REGION 1..9: note = Synthetic
QQCHEWPPT

SEQ ID NO: 2137 - protein, 123 aa, synthetic construct
  REGION 1..123: note = Synthetic
EVQLLESGGGLVQPGGSLRLSCAASGFSFRTSGMNWVRQAPGKGLEWVSAISVTGGSTYYADSVQGRFTISRDNSKNTLYLRMNSLRADDTAVYYCAKDLNSGIVGPTANEYWGQGALVTVSS

SEQ ID NO: 2138 - protein, 16 aa, synthetic construct
  REGION 1..16: note = Synthetic
AKDLNSGIVGPTANEY

SEQ ID NO: 2139 - protein, 109 aa, synthetic construct
  REGION 1..109: note = Synthetic
EIVLTQSPGTLSLSPGERATLSCRASESVSSNYLAWYQQKPGQAPRLLIYAASSRATGIPDRFSGSGSGTDFTLTISRLEPEDFAVYYCQQYGTSPPITFGQGTRLEIK

SEQ ID NO: 2140 - protein, 10 aa, synthetic construct
  REGION 1..10: note = Synthetic
QQYGTSPPIT

SEQ ID NO: 2141 - protein, 124 aa, synthetic construct
  REGION 1..124: note = Synthetic
QLQLQESGPGLVKPSETLSLTCTVSGGSISSSSYYWWGWIRQPPGKGLEWLGTIHSSGITYSNPSLKSRVTISVDASENHFSLRLTSVTAADTAVYYCARYSSGYSYDDGFDFWGQGTLVTVSS

SEQ ID NO: 2142 - protein, 15 aa, synthetic construct
  REGION 1..15: note = Synthetic
ARYSSGYSYDDGFDF

SEQ ID NO: 2143 - protein, 107 aa, synthetic construct
  REGION 1..107: note = Synthetic
DIQMTQSPSSLSASVGDRVTITCRPSQDIRNDLAWYQQKPGEAPKRLIFGASTLQSGVPSRFSGSGPGTDFTLTISSLQPEDFATYYCLQYHSYPLTFGGGTKVEIK

SEQ ID NO: 2144 - protein, 9 aa, synthetic construct
  REGION 1..9: note = Synthetic
LQYHSYPLT

SEQ ID NO: 2145 - protein, 126 aa, synthetic construct; identical to SEQ ID NO: 414
  REGION 1..126: note = Synthetic

SEQ ID NO: 2146 - protein, 15 aa, synthetic construct
  REGION 1..15: note = Synthetic
ARVLCGSTSCYYFDY

SEQ ID NO: 2147 - protein, 107 aa, synthetic construct
  REGION 1..107: note = Synthetic
EIVLTQSPATLSLSPGERATLSCRASQSVGSFLAWYQQKPGQAPRLLIYDTSNRATGIPARFSGSGSGTDFTLTISSLDPEDFGLYYCQQRGNWPPTFGQGTRLDIK

SEQ ID NO: 2148 - protein, 9 aa, synthetic construct
  REGION 1..9: note = Synthetic
QQRGNWPPT

SEQ ID NO: 2149 - protein, 123 aa, synthetic construct
  REGION 1..123: note = Synthetic
QVQLVESGGGVVQPGRSLRLSCAASGFTFSDFAMHWLRQAPGKGLEWVAVILYDESKKFYADSVKGRFTISRDNSKNTLYLQMSSLRAEDTTVYYCARDFGFLKWLPSGLDFWGQGILVTVSS

SEQ ID NO: 2150 - protein, 16 aa, synthetic construct
  REGION 1..16: note = Synthetic
ARDFGFLKWLPSGLDF

SEQ ID NO: 2151 - protein, 107 aa, synthetic construct
  REGION 1..107: note = Synthetic
DIQMTQSPSSLSASVGDRVTITCRASQDISNSLAWYQQKVGKAPKLLLYAASRLQSGVPSRFSGSGSGTDYTLTISSLQPEDFASYYCLQYSTTPLAFGGGTKVEIK

SEQ ID NO: 2152 - protein, 9 aa, synthetic construct
  REGION 1..9: note = Synthetic
LQYSTTPLA

SEQ ID NO: 2153 - protein, 120 aa, synthetic construct; identical to SEQ ID NO: 415
  REGION 1..120: note = Synthetic

SEQ ID NO: 2154 - protein, 13 aa, synthetic construct
  REGION 1..13: note = Synthetic
ARDRLAGSNYFDY

SEQ ID NO: 2155 - protein, 109 aa, synthetic construct
  REGION 1..109: note = Synthetic
EIVLTQSPATLSLSPGQRATLSCRASQSVGRFLAWYQQRPGQAPRLLIYDTSNRATGIPARFSGSGSETDFTLTISSLEPEDFAVYYCQQRGTWPPAITFGPGTKVDIK

SEQ ID NO: 2156 - protein, 11 aa, synthetic construct
  REGION 1..11: note = Synthetic
QQRGTWPPAIT

SEQ ID NO: 2157 - protein, 133 aa, synthetic construct
  REGION 1..133: note = Synthetic
EVQLVESGGGLVQPGRSLRLSCAASGFTFDDFAMHWVRQTPGKGLEWVSGISWNSDIIGYADSVKGRFTISRDNARNSLYLQMNSLRAEDTALYYCAKDVRTRETVAGFLSLLDNYYYGMDVWGRGTTVTVSS

SEQ ID NO: 2158 - protein, 26 aa, synthetic construct
  REGION 1..26: note = Synthetic
AKDVRTRETVAGFLSLLDNYYYGMDV

SEQ ID NO: 2159 - protein, 112 aa, synthetic construct
  REGION 1..112: note = Synthetic
DIVMTQSPLSLPVTPGEPASISCRSSQSLLHRNGYNYLDWYLQKPGQSPQLLIYLGSNRASGVPDRFSGSGSGTDFTLKISRVEAEDVGVYYCMQALQTPWTFGQGTKVEIK

SEQ ID NO: 2160 - protein, 9 aa, synthetic construct
  REGION 1..9: note = Synthetic
MQALQTPWT

SEQ ID NO: 2161 - protein, 126 aa, synthetic construct; identical to SEQ ID NO: 397
  REGION 1..126: note = Synthetic

SEQ ID NO: 2162 - protein, 19 aa, synthetic construct
  REGION 1..19: note = Synthetic
ATDYYDRSHYYGLTSPFDY

SEQ ID NO: 2163 - protein, 113 aa, synthetic construct; identical to SEQ ID NO: 398
  REGION 1..113: note = Synthetic

SEQ ID NO: 2164 - protein, 9 aa, synthetic construct
  REGION 1..9: note = Synthetic
MQRIEFPIT

SEQ ID NO: 2165 - protein, 126 aa, synthetic construct; identical to SEQ ID NO: 395
  REGION 1..126: note = Synthetic

SEQ ID NO: 2166 - protein, 19 aa, synthetic construct
  REGION 1..19: note = Synthetic
AKVSGARHYGDYGETSFDY

SEQ ID NO: 2167 - protein, 109 aa, synthetic construct; identical to SEQ ID NO: 396
  REGION 1..109: note = Synthetic

SEQ ID NO: 2168 - protein, 10 aa, synthetic construct
  REGION 1..10: note = Synthetic
QQYGSSPPYT

SEQ ID NO: 2169 - protein, 118 aa, synthetic construct
  REGION 1..118: note = Synthetic
EVQLLESGGGLVQPGGSLRLSCAASGFTFSISAMSWVRQAPGKGLEWVSTISTSGGSTYYADSVKGRFTISRDNSKNTLYLQMNSLRAEDTALYYCAKDLGSYYPAYWGQGTLVTVSS

SEQ ID NO: 2170 - protein, 11 aa, synthetic construct
  REGION 1..11: note = Synthetic
AKDLGSYYPAY

SEQ ID NO: 2171 - protein, 108 aa, synthetic construct
  REGION 1..108: note = Synthetic
DIQMTQSPSSLSASVGDRVTITCRASQGIRNDLDWYQQKPGKAPKRLIHAASNLQSGVPSRFSGSGSGTEFTLTISSLQPEDFASYYCLQYNSYPRGTFGQGTKLEIK

SEQ ID NO: 2172 - protein, 10 aa, synthetic construct
  REGION 1..10: note = Synthetic
LQYNSYPRGT

SEQ ID NO: 2173 - protein, 125 aa, synthetic construct
  REGION 1..125: note = Synthetic
QVQLQESGPGLVKPSQTLSLTCTVSGGSIHSSTYFWSWVRQHPGKGLEWIGYIYYTGTTYYNPSLNSRVTIVLDTSKNQFFLKVNSVTAADTAVYFCARSYFDPYGQNLYGMDVWGQGTTVTVSS

SEQ ID NO: 2174 - protein, 17 aa, synthetic construct
  REGION 1..17: note = Synthetic
ARSYFDPYGQNLYGMDV

SEQ ID NO: 2175 - protein, 107 aa, synthetic construct
  REGION 1..107: note = Synthetic
DIQLTQSPSFLSASAEDRVTVTCRASQDISSDLAWYQQKPGKAPKLLIYAASTLQNGVPSRFSGSGSGTDFTLTISSLQPEDFATYYCQQLNSYPLTFGGGTTVEIK

SEQ ID NO: 2176 - protein, 9 aa, synthetic construct
  REGION 1..9: note = Synthetic
QQLNSYPLT

SEQ ID NO: 2177 - protein, 122 aa, synthetic construct; identical to SEQ ID NO: 411
  REGION 1..122: note = Synthetic

SEQ ID NO: 2178 - protein, 15 aa, synthetic construct
  REGION 1..15: note = Synthetic
AKGDTFMVPYNWFDP

SEQ ID NO: 2179 - protein, 105 aa, synthetic construct; identical to SEQ ID NO: 412
  REGION 1..105: note = Synthetic

SEQ ID NO: 2180 - protein, 8 aa, synthetic construct
  REGION 1..8: note = Synthetic
QQRGDLPS

SEQ ID NO: 2181 - protein, 120 aa, synthetic construct
  REGION 1..120: note = Synthetic
QVQLVESGGGVVQPGRSLRLSCEASGFTFSSHGIHWVRQAPGKGLEWLAVIWYDGNNKFYADSVKGRFTISRDNSRNTLFLQMNSLRAEDTALYYCARDRLAGSNYFDFWGHGTLVAVSS

SEQ ID NO: 2182 - protein, 13 aa, synthetic construct
  REGION 1..13: note = Synthetic
ARDRLAGSNYFDF

SEQ ID NO: 2183 - protein, 108 aa, synthetic construct
  REGION 1..108: note = Synthetic
EIVLTQSPATLSLSPGQRATLSCRASQSVGRFLAWYQQKPGQAPRLLIYDTSNRATGVPDRFSGSGSETDFTLTIYSLEPDDSAVYYCQQRGTWPPAITFGPGTKVDI

SEQ ID NO: 2184 - protein, 11 aa, synthetic construct
  REGION 1..11: note = Synthetic
QQRGTWPPAIT

SEQ ID NO: 2185 - protein, 125 aa, synthetic construct
  REGION 1..125: note = Synthetic
EVQLVESGGGLVQPGGSLRLSCTASGFTFSGYWMSWVRQAPGKGLEWVANIKQDGDEKYYVDSVRGRFTISRDNAKNSLYLQMTSLRADDTAVYYCSREGASVFPWLGESLIDYWGQGTLVTVSS

SEQ ID NO: 2186 - protein, 18 aa, synthetic construct
  REGION 1..18: note = Synthetic
SREGASVFPWLGESLIDY

SEQ ID NO: 2187 - protein, 107 aa, synthetic construct
  REGION 1..107: note = Synthetic
AIQMTQSPSSLSASVGDRVSITCRASQGIRDDLGWYQQKPGKAPKLLIYAASSLQSGVPSRFSGSGSGTDFTLTISSLQPEDFATYYCLQDYSYPRTFGQGTKVEIK

SEQ ID NO: 2188 - protein, 9 aa, synthetic construct
  REGION 1..9: note = Synthetic
LQDYSYPRT

SEQ ID NO: 2189 - protein, 123 aa, synthetic construct
  REGION 1..123: note = Synthetic
QVQLQESGPGLVKPSETLSLTCTVSGGSINNYYWSWIRQPPGKGLEWIGYIYYSESINYNPSLKGRVTISVDTSKNQFSLKLNSVTAADTAVYYCARSGMVRGVIGVRYFDLWGRGTLVTVSS

SEQ ID NO: 2190 - protein, 17 aa, synthetic construct
  REGION 1..17: note = Synthetic
ARSGMVRGVIGVRYFDL

SEQ ID NO: 2191 - protein, 107 aa, synthetic construct
  REGION 1..107: note = Synthetic
EIVMTQSPATLPVSPGERATLSCRASQSLSNNLAWYQHKPGQAPRLLIYDASTRPIGIPARFSGSGSGTEFTLTISSLQSEDFAVYYCQQYNNWPPLFGPGTKVDIK

SEQ ID NO: 2192 - protein, 9 aa, synthetic construct
  REGION 1..9: note = Synthetic
QQYNNWPPL

SEQ ID NO: 2193 - protein, 126 aa, synthetic construct
  REGION 1..126: note = Synthetic
QVQLQESGPGLVKPSQTLSLTCTVSGDSVTSGGYYWSWIRQFPGKGLEWIGYIYYTESAYYNPSLKSRVTISVDTSKNQVSLKLTSVIAADTAVYFCARGGDFYDESGYRGAFDVWGQGTLVTVSS

SEQ ID NO: 2194 - protein, 18 aa, synthetic construct
  REGION 1..18: note = Synthetic
ARGGDFYDESGYRGAFDV

SEQ ID NO: 2195 - protein, 106 aa, synthetic construct
  REGION 1..106: note = Synthetic
AIQMTQSPSSLSASVGDTVTITCRASQDLRMNLGWYQQRPGRAPNLLIYAVSTLQTGVPSRFSGSGSGTDFTLTISSLQPEDFATYYCLQDYSYPLTFGQGTRLEI

SEQ ID NO: 2196 - protein, 9 aa, synthetic construct
  REGION 1..9: note = Synthetic
LQDYSYPLT

SEQ ID NO: 2197 - protein, 121 aa, synthetic construct
  REGION 1..121: note = Synthetic
QVQLVESGGGVVQPGRSLRLSCAASGFTFSSYGMHWVRQAPGKGLEWVAGIYYDGSNKYYADSVKGRFTISRDNSKNTLYLQMNSLRAEDTAVFYCARDRGFTGYAHFDYWGQGTLVTVSS

SEQ ID NO: 2198 - protein, 14 aa, synthetic construct
  REGION 1..14: note = Synthetic
ARDRGFTGYAHFDY

SEQ ID NO: 2199 - protein, 109 aa, synthetic construct; identical to SEQ ID NO: 2087
  REGION 1..109: note = Synthetic

SEQ ID NO: 2200 - protein, 10 aa, synthetic construct
  REGION 1..10: note = Synthetic
QQYGSSPSWT

SEQ ID NO: 2201 - protein, 125 aa, synthetic construct
  REGION 1..125: note = Synthetic
EVQLVESGGGLVQPGGSLRLSCAASGFTFRSHGMNWVRQAPGKGLEWVSYITSSSTTTYYADSVKGRFTISRDNAKNSLYLQMNSLRAEDTAIYYCARESFDILTGWESSNPDYWGQGTLVTVSS

SEQ ID NO: 2202 - protein, 18 aa, synthetic construct
  REGION 1..18: note = Synthetic
ARESFDILTGWESSNPDY

SEQ ID NO: 2203 - protein, 107 aa, synthetic construct
  REGION 1..107: note = Synthetic
DIQMTQSPSSLSASVGDRVTITCRASQGIRNDLGWYQQKPGKAPKRLIYATFKLHSGVPSRFSGSGSGTEFTLTIINLQPEDFATYYCLQHNGYPLTFGQGTRLEIK

SEQ ID NO: 2204 - protein, 9 aa, synthetic construct
  REGION 1..9: note = Synthetic
LQHNGYPLT

SEQ ID NO: 2205 - protein, 124 aa, synthetic construct; identical to SEQ ID NO: 401
  REGION 1..124: note = Synthetic

SEQ ID NO: 2206 - protein, 16 aa, synthetic construct
  REGION 1..16: note = Synthetic
ARSKLSRTYYNFPFDS

SEQ ID NO: 2207 - protein, 113 aa, synthetic construct; identical to SEQ ID NO: 402
  REGION 1..113: note = Synthetic

SEQ ID NO: 2208 - protein, 9 aa, synthetic construct
  REGION 1..9: note = Synthetic
QQYYNIPRT

SEQ ID NO: 2209 - protein, 114 aa, synthetic construct
  REGION 1..114: note = Synthetic
EVQLVESGGGLVKPGGSLRLSCAASGFTFSTYNMNWVSSISSRSTFIFYADSVKGRFTISRDNAKNLLYLQMDSLGAEDTGVYYCARDLVGQWLAPTNQYFDYWGRGALVTVSS

SEQ ID NO: 2210 - protein, 18 aa, synthetic construct
  REGION 1..18: note = Synthetic
ARDLVGQWLAPTNQYFDY

SEQ ID NO: 2211 - protein, 107 aa, synthetic construct
  REGION 1..107: note = Synthetic
EIVLTQSPGTLSLSPGERATLSCRASQTISSRYLAWYQQKPGQAPRLLIYDASTRATGIGDRFSGSGSGTDFTLTINGLEPEDFAVYYCQQYDASPRTFGQGTKVEI

SEQ ID NO: 2212 - protein, 9 aa, synthetic construct
  REGION 1..9: note = Synthetic
QQYDASPRT

SEQ ID NO: 2213 - protein, 126 aa, synthetic construct; identical to SEQ ID NO: 393
  REGION 1..126: note = Synthetic

SEQ ID NO: 2214 - protein, 19 aa, synthetic construct
  REGION 1..19: note = Synthetic
ATAPAFLERREYSYYGMNV

SEQ ID NO: 2215 - protein, 107 aa, synthetic construct
  REGION 1..107: note = Synthetic
DIQLTQSPSFLSASVGDRVTITCRASQGINNYLAWYQQKPGKAPKLLIYGASTLQSGVPSKFSGSGSGTEFTLTISSLQPEDFATYYCQQVSSFPRTFGPGTRVDIK

SEQ ID NO: 2216 - protein, 9 aa, synthetic construct
  REGION 1..9: note = Synthetic
QQVSSFPRT

SEQ ID NO: 2217 - protein, 122 aa, synthetic construct; identical to SEQ ID NO: 403
  REGION 1..122: note = Synthetic

SEQ ID NO: 2218 - protein, 15 aa, synthetic construct
  REGION 1..15: note = Synthetic
AREYSSSWYNGPLDV

SEQ ID NO: 2219 - protein, 110 aa, synthetic construct; identical to SEQ ID NO: 404
  REGION 1..110: note = Synthetic

SEQ ID NO: 2220 - protein, 11 aa, synthetic construct
  REGION 1..11: note = Synthetic
QQYGSSPPLWT

SEQ ID NO: 2221 - protein, 125 aa, synthetic construct
  REGION 1..125: note = Synthetic
EVQLLESGGGLVQPGGSLRLSCAASGFTFSSYAMSWVRQAPGKGLEWVSGISGSGSRTYYADSVKGRFTISRDKSKNTLYLQMNSLRAEDTAVYYCAKDPNYCSGGSCYSGFDYWGQGTLVTVSS

SEQ ID NO: 2222 - protein, 18 aa, synthetic construct
  REGION 1..18: note = Synthetic
AKDPNYCSGGSCYSGFDY

SEQ ID NO: 2223 - protein, 112 aa, synthetic construct
  REGION 1..112: note = Synthetic
NFMLTQPHSVSESPGKTVTISCTRSSGSIASNYVQWYQQRPGSAPTTVIYEDHQRPSGVPDRFSGSIDSSSNSASLTISGLKTEDEADYYCQSYDSSNSPWVFGGGTKLTVL

SEQ ID NO: 2224 - protein, 11 aa, synthetic construct
  REGION 1..11: note = Synthetic
QSYDSSNSPWV

SEQ ID NO: 2225 - protein, 128 aa, synthetic construct; identical to SEQ ID NO: 433
  REGION 1..128: note = Synthetic

SEQ ID NO: 2226 - protein, 21 aa, synthetic construct
  REGION 1..21: note = Synthetic
ATAVAVAGTPTNYYYYYGIDV

SEQ ID NO: 2227 - protein, 110 aa, synthetic construct; identical to SEQ ID NO: 434
  REGION 1..110: note = Synthetic

SEQ ID NO: 2228 - protein, 11 aa, synthetic construct
  REGION 1..11: note = Synthetic
AARDDSLSGWV

SEQ ID NO: 2229 - protein, 122 aa, synthetic construct
  REGION 1..122: note = Synthetic
QVQLVQSGAEVKKPGASVKVSCKVSGYTLIEVSMHWVRQAPGKGLEWMGGFDPEDGETIYAQKFQGRVTMTEDTSTDTAYMELISLRSEDTAVYYCATGSAVAGTGRWFDPWGQGTLVTVSS

SEQ ID NO: 2230 - protein, 15 aa, synthetic construct
  REGION 1..15: note = Synthetic
ATGSAVAGTGRWFDP

SEQ ID NO: 2231 - protein, 109 aa, synthetic construct
  REGION 1..109: note = Synthetic
QSVLTQPPSASGSPGQSVTISCTGTSSDVGGYNYVSWYQQHPGKAPKLMIYEVSKRPSGVPDRFSGSKSGNTASLTVSGLQAEDEADYYCSSYAGSAWVFGGGTKLTVL

SEQ ID NO: 2232 - protein, 9 aa, synthetic construct
  REGION 1..9: note = Synthetic
SSYAGSAWV

SEQ ID NO: 2233 - protein, 121 aa, synthetic construct
  REGION 1..121: note = Synthetic
QVQLVQSGAEVKKPGASVKVSCKVSGYTLIELSIHWVRQAPGKGLEWMGGFDPEDAETIYAQKFQGRVTMTEDTSTDTAYMELSSLRSEDTALYYCATGSPLVPESWFDPWGQGTLVTVSS

SEQ ID NO: 2234 - protein, 14 aa, synthetic construct
  REGION 1..14: note = Synthetic
ATGSPLVPESWFDP

SEQ ID NO: 2235 - protein, 106 aa, synthetic construct
  REGION 1..106: note = Synthetic
SYVLTQPPSVSVSPGQTASITCSGDKLGDKYASWYQQKPGQSPVLIIYQNTKRPSGIPERFSGSNSGNTATLTISGTQAMDEADYYCQAWDSSTVVFGGGTKLTVL

SEQ ID NO: 2236 - protein, 9 aa, synthetic construct
  REGION 1..9: note = Synthetic
QAWDSSTVV

SEQ ID NO: 2237 - protein, 122 aa, synthetic construct
  REGION 1..122: note = Synthetic
QVQLVQSGAEVKKPGASVKVSCKVSGYTLPELSIHWVRQAPGKGLEWMGGFDPEDGETIYAQKFQGRVSMTEDTSTDTAYMELSSLRSEDTAVYYCATGAPFSGWAYWFDPWGQGTLVTVSS

SEQ ID NO: 2238 - protein, 15 aa, synthetic construct
  REGION 1..15: note = Synthetic
ATGAPFSGWAYWFDP

SEQ ID NO: 2239 - protein, 110 aa, synthetic construct
  REGION 1..110: note = Synthetic
QSVLTQPPSASGSPGQSVTISCTGTSSDVGAYNYVSWYQQHPGKAPKLMIFEVTKRPSGVPDRFSGSKSGNTASLTVSGLQAEDEADYYCSSYAGSHNVVFGGGTKLTVL

SEQ ID NO: 2240 - protein, 10 aa, synthetic construct
  REGION 1..10: note = Synthetic
SSYAGSHNVV

SEQ ID NO: 2241 - protein, 117 aa, synthetic construct; identical to SEQ ID NO: 479
  REGION 1..117: note = Synthetic

SEQ ID NO: 2242 - protein, 10 aa, synthetic construct
  REGION 1..10: note = Synthetic
AKDQGSGYSD

SEQ ID NO: 2243 - protein, 106 aa, synthetic construct
  REGION 1..106: note = Synthetic
SYVLTQPPSVSVSPGQTARITCSGDKLGDKYVCWYQQKPGQSPVLVIYQDSKRPSGIPERFSGSNSGNTATLTISGTQAMDEADYYCQAWDSSTVVFGRGTKLTVL

SEQ ID NO: 2244 - protein, 9 aa, synthetic construct
  REGION 1..9: note = Synthetic
QAWDSSTVV

SEQ ID NO: 2245 - protein, 129 aa, synthetic construct
  REGION 1..129: note = Synthetic
QVQLVQSGAEVKKPGASVKVSCKASGYTFTSYGISWVRQAPGQGLEWMGWISAYNGNTNYAQKLQGRVTMTTDTSTSTAYMELRSLRSDDTAVYYCARDGEMGGSYRYVDYYYYGMDVWGQGTTVTVSS

SEQ ID NO: 2246 - protein, 22 aa, synthetic construct
  REGION 1..22: note = Synthetic
ARDGEMGGSYRYVDYYYYGMDV

SEQ ID NO: 2247 - protein, 106 aa, synthetic construct
  REGION 1..106: note = Synthetic
SYVLTQPPSVSVSPGQTASITCSGDKLGDKYACWYQQKPGQSPVLVIYQDSKRPSGIPERFSGSNSGNTATLTISGTQAMDEADYYCQAWDSSTAVFGGGTKLTVL

SEQ ID NO: 2248 - protein, 9 aa, synthetic construct
  REGION 1..9: note = Synthetic
QAWDSSTAV

SEQ ID NO: 2249 - protein, 128 aa, synthetic construct
  REGION 1..128: note = Synthetic
EVQLVESGGGLVKPGGSLRLSCAASGFTFSNAWMSWVRQAPGKGLEWVGRIKSKTDGGTTDYAAPVKGRFTISRDDSKNTLYLQMNSLKTEDTAVYYCTTGFEDCSSTSCYDIYFDYWGQGTLVTVSS

SEQ ID NO: 2250 - protein, 19 aa, synthetic construct
  REGION 1..19: note = Synthetic
TTGFEDCSSTSCYDIYFDY

SEQ ID NO: 2251 - protein, 106 aa, synthetic construct
  REGION 1..106: note = Synthetic
SYVLTQPPSVSVSPGQTASITCSGDKLGDKYACWYQQKPGQSPVLVIYQDSKRPSGIPERFSGSNSGNTATLTISGTQAMDEADYYCQAWDSSTVVFGGGTKLTVL

SEQ ID NO: 2252 - protein, 9 aa, synthetic construct
  REGION 1..9: note = Synthetic
QAWDSSTVV

SEQ ID NO: 2253 - protein, 127 aa, synthetic construct; identical to SEQ ID NO: 447
  REGION 1..127: note = Synthetic

SEQ ID NO: 2254 - protein, 20 aa, synthetic construct
  REGION 1..20: note = Synthetic
AKGVRLVPGDFWDNYWYFDL

SEQ ID NO: 2255 - protein, 110 aa, synthetic construct
  REGION 1..110: note = Synthetic
QSVLTQPPSASGSPGQSVTISCTGTSSDVGGYNYVSWYQQHPGKAPKLMIYEVSKRPSGVPDRFSGSKSGNTASLTVSGLQAEDEADYYCSSYAGSNNLVFGGGTKLTVL

SEQ ID NO: 2256 - protein, 10 aa, synthetic construct
  REGION 1..10: note = Synthetic
SSYAGSNNLV

SEQ ID NO: 2257 - protein, 120 aa, synthetic construct
  REGION 1..120: note = Synthetic
QVQLVESGGGLVKPGGSLRLSCAASGFTFSDYYMSWIRQAPGKGLEWVSYISSSFSYTNYADSVKGRFTISRDNAKNSLSLQMNSLRAEDTAVYYCAIAPAETREAFDIWGQGTMVTVSS

SEQ ID NO: 2258 - protein, 13 aa, synthetic construct
  REGION 1..13: note = Synthetic
AIAPAETREAFDI

SEQ ID NO: 2259 - protein, 105 aa, synthetic construct
  REGION 1..105: note = Synthetic
SYVLTQPPSVSVSPGQTASISCSGDKLGDKYACWYQQKPGQSPVLVIYQDTKRPSGIPERFSGSNSGNTATLTISGTQAMDEADYYCQAWDSRVVFGGGTKLTVL

SEQ ID NO: 2260 - protein, 8 aa, synthetic construct
  REGION 1..8: note = Synthetic
QAWDSRVV

SEQ ID NO: 2261 - protein, 120 aa, synthetic construct; identical to SEQ ID NO: 445
  REGION 1..120: note = Synthetic

SEQ ID NO: 2262 - protein, 13 aa, synthetic construct
  REGION 1..13: note = Synthetic
ARDQGATRRELAY

SEQ ID NO: 2263 - protein, 110 aa, synthetic construct
  REGION 1..110: note = Synthetic
QSVLTQPASVSGSPGQSITISCTGTSSDVGSYNLVSWFQQHPGKAPKLMIYQVSKRPSGVSNRFSGSKSGNTASLTISGLQAEDEADYYCYSYAGSSTWVFGGGTKLTVL

SEQ ID NO: 2264 - protein, 10 aa, synthetic construct
  REGION 1..10: note = Synthetic
YSYAGSSTWV

SEQ ID NO: 2265 - protein, 124 aa, synthetic construct
  REGION 1..124: note = Synthetic
EVQLLESGGGLVQPGGSLRLSCAASGFTFSSYAMSWVRQAPGKGLEWVSAISGNGGGTYYADSVKGRFTISRDNSKNTLYLQMNGLRAEDTAVYYCAKEPLGRSWNVGDAFDIWGQGTLVTVSS

SEQ ID NO: 2266 - protein, 17 aa, synthetic construct
  REGION 1..17: note = Synthetic
AKEPLGRSWNVGDAFDI

SEQ ID NO: 2267 - protein, 109 aa, synthetic construct
  REGION 1..109: note = Synthetic
QSVLTQPPSASGTPGQRVTISCSGSSSNIGNNYVYWYQQLPGTAPKLLIYRNNQRPSGVPDRFSVSKSGTSASLAISGLRSEDEADYYCAAWDDSLRGVFGGGTKLTVL

SEQ ID NO: 2268 - protein, 10 aa, synthetic construct
  REGION 1..10: note = Synthetic
AAWDDSLRGV

SEQ ID NO: 2269 - protein, 120 aa, synthetic construct
  REGION 1..120: note = Synthetic
EVQLLESGGGLVQPGGSLRLSCAASGFTFITYAMSWVRQAPGKGLQWVSTISVSGGSTYYADSVKGRFTISRDNSKNTLYLQMNSLRAEDTAVYYCAQTTSGWGGWFDPWGQGTLVTVSS

SEQ ID NO: 2270 - protein, 13 aa, synthetic construct
  REGION 1..13: note = Synthetic
AQTTSGWGGWFDP

SEQ ID NO: 2271 - protein, 110 aa, synthetic construct
  REGION 1..110: note = Synthetic
QSVLTQPASVSGSPGQSITISCTGTSSDVGSYNLVSWYQQHPGKAPKLMIYEGSKRPSGVSNRFSGSKSGNTASLTISGLQAEDEADYYCCSYARSITYVFGTGTKVTVL

SEQ ID NO: 2272 - protein, 10 aa, synthetic construct
  REGION 1..10: note = Synthetic
CSYARSITYV

SEQ ID NO: 2273 - protein, 124 aa, synthetic construct; identical to SEQ ID NO: 473
  REGION 1..124: note = Synthetic

SEQ ID NO: 2274 - protein, 17 aa, synthetic construct
  REGION 1..17: note = Synthetic
AKDAAAARFHYYFYMDV

SEQ ID NO: 2275 - protein, 112 aa, synthetic construct
  REGION 1..112: note = Synthetic
QSVLTQPASVSGSPGQSITISCTGTSSDVGSYNLVSWYQHHPGKAPKLMIYEGSKRPSGVSYRFSGSKSGNTASLTISGLQAEDEADYYCCSYAGSSTSYVIFGGGTKLTVL

SEQ ID NO: 2276 - protein, 12 aa, synthetic construct
  REGION 1..12: note = Synthetic
CSYAGSSTSYVI

SEQ ID NO: 2277 - protein, 124 aa, synthetic construct
  REGION 1..124: note = Synthetic
QLQLQESGPGLVKPSETLSLTCTVSGGSFSSSSYYWGWIRQPPGKGLEWIGSIYYSGSTYYNPSLKSQVTISVDTSKKQFSLKLSSVTAADTAVYYCARHPLSSPRPGGAFDIWGQGTMVTVSS

SEQ ID NO: 2278 - protein, 16 aa, synthetic construct
  REGION 1..16: note = Synthetic
ARHPLSSPRPGGAFDI

SEQ ID NO: 2279 - protein, 111 aa, synthetic construct
  REGION 1..111: note = Synthetic
QSVLTQPASVSGSPGQSITISCTGTSSDVGSYNLVSWYQQHPGKAPKLMIYEGSKRPSGVSNRFSGSKSGNTASLTISGLQAEDESDYYCCSYAGSSTSWVFGGGTKLTVL

SEQ ID NO: 2280 - protein, 11 aa, synthetic construct
  REGION 1..11: note = Synthetic
CSYAGSSTSWV

SEQ ID NO: 2281 - protein, 125 aa, synthetic construct
  REGION 1..125: note = Synthetic
EVQLVESGGGLVQPGGSLRLSCAASGFAFSSYSMNWVRQAPGKGLEWVSYIGTSSSTIYYADSVKGRFTISRDNAKNSLYLQMNSLRAEDTAVYYCASNPATTMTTSRYYGMDVWGQGTTVTVSS

SEQ ID NO: 2282 - protein, 18 aa, synthetic construct
  REGION 1..18: note = Synthetic
ASNPATTMTTSRYYGMDV

SEQ ID NO: 2283 - protein, 106 aa, synthetic construct
  REGION 1..106: note = Synthetic
SYVLTQPPSVSVSPGQTASITCSGDKLGDRYACWYQQKPGQSPVLVIYQDSKRPSGIPERFSGSNSGNTATLTISGTQAMDEADYYCQAWDSSNVVFGGGTKLTVL

SEQ ID NO: 2284 - protein, 9 aa, synthetic construct
  REGION 1..9: note = Synthetic
QAWDSSNVV

SEQ ID NO: 2285 - protein, 117 aa, synthetic construct; identical to SEQ ID NO: 467
  REGION 1..117: note = Synthetic

SEQ ID NO: 2286 - protein, 10 aa, synthetic construct
  REGION 1..10: note = Synthetic
ATVPAGTIYY

SEQ ID NO: 2287 - protein, 110 aa, synthetic construct
  REGION 1..110: note = Synthetic
QSVLTQPASVSGSPGQSITISCTGTSSDVGSYNLVSWYQHHPGKAPKLMIYEVNKRPSGVSIRFSGSKSGNTASLTISGLQAEDEADYYCCSYAGFSTYVFGGGTKLTVL

SEQ ID NO: 2288 - protein, 10 aa, synthetic construct
  REGION 1..10: note = Synthetic
CSYAGFSTYV

SEQ ID NO: 2289 - protein, 123 aa, synthetic construct
  REGION 1..123: note = Synthetic
EVQLLESGGGLVQPGGSLRLSCAASGFTFSSYAMSWVRQAPGKGLEWVSAISVSGGSTYYADSVKGRFTISRDNSKNTLYLQMNSLRAEDTAVYYCAKDLSTGIVGATTVDYWGQGTLVTVSS

SEQ ID NO: 2290 - protein, 16 aa, synthetic construct
  REGION 1..16: note = Synthetic
AKDLSTGIVGATTVDY

SEQ ID NO: 2291 - protein, 110 aa, synthetic construct
  REGION 1..110: note = Synthetic
QSVLTQPASVSGSPGQSITISCTGTSSDVGGYNYVSWYQQHPGKAPKLMIYDVSNRPSGVSNRFSGSKSGNTASLTISGLQAEDEADYYCSSYTSSSTYVFGTGTKVTVL

SEQ ID NO: 2292 - protein, 10 aa, synthetic construct
  REGION 1..10: note = Synthetic
SSYTSSSTYV

SEQ ID NO: 2293 - protein, 121 aa, synthetic construct
  REGION 1..121: note = Synthetic
QVQLVQSGAEVKKPGASVKVSCKVSGYTLTELSMHWVRQAPGKGLEWMGGFDPEDVETIYAQKFQGRVTMTEDTSTDTAYMELSSLRSEDTAVYYCGTAPAIFGVVSPDYWGQGTLVTVSS

SEQ ID NO: 2294 - protein, 14 aa, synthetic construct
  REGION 1..14: note = Synthetic
GTAPAIFGVVSPDY

SEQ ID NO: 2295 - protein, 110 aa, synthetic construct
  REGION 1..110: note = Synthetic
QSVLTQPPSASGTPGQRVTISCSGSSSNIGSNTVNWYQQLPGTAPKLLMYRNNQRPSGVPDRFSGSKSGTSASLAISGLQSEDEADYYCAAWDDSLNGPVFGGGTKLTVL

SEQ ID NO: 2296 - protein, 11 aa, synthetic construct
  REGION 1..11: note = Synthetic
AAWDDSLNGPV

SEQ ID NO: 2297 - protein, 124 aa, synthetic construct; identical to SEQ ID NO: 463
  REGION 1..124: note = Synthetic

SEQ ID NO: 2298 - protein, 17 aa, synthetic construct
  REGION 1..17: note = Synthetic
ARPSGIAAAGGGYYFDY

SEQ ID NO: 2299 - protein, 110 aa, synthetic construct
  REGION 1..110: note = Synthetic
QFVLTQPASVSGSPGQSITISCTGTSSDVGTYNYVSWYQQHPGKAPKLMIYEVSNRPSGVSNRFSGSKSGNTASLTISGLQAEDEADYYCSSYTSSSTRVFGGGTKLTVL

SEQ ID NO: 2300 - protein, 10 aa, synthetic construct
  REGION 1..10: note = Synthetic
SSYTSSSTRV

SEQ ID NO: 2301 - protein, 129 aa, synthetic construct; identical to SEQ ID NO: 455
  REGION 1..129: note = Synthetic

SEQ ID NO: 2302 - protein, 21 aa, synthetic construct
  REGION 1..21: note = Synthetic
ARDPHRLYYYDSSGYANAFDI

SEQ ID NO: 2303 - protein, 110 aa, synthetic construct
  REGION 1..110: note = Synthetic
QSVLTQPASVSGSPGQSITISCTGTSSDVGSYNLVSWYQQHPGKAPKFLIYEVNKRPSGVSNRFSGSKSGNTASLTISGLQAEDEADYYCCSYAGSIIWVFGGGTKLTVL

SEQ ID NO: 2304 - protein, 10 aa, synthetic construct
  REGION 1..10: note = Synthetic
CSYAGSIIWV

SEQ ID NO: 2305 - protein, 117 aa, synthetic construct; identical to SEQ ID NO: 477
  REGION 1..117: note = Synthetic

SEQ ID NO: 2306 - protein, 10 aa, synthetic construct
  REGION 1..10: note = Synthetic
AKDSGAGYDY

SEQ ID NO: 2307 - protein, 106 aa, synthetic construct; identical to SEQ ID NO: 2251
  REGION 1..106: note = Synthetic

SEQ ID NO: 2308 - protein, 9 aa, synthetic construct
  REGION 1..9: note = Synthetic
QAWDSSTVV

SEQ ID NO: 2309 - protein, 127 aa, synthetic construct; identical to SEQ ID NO: 483
  REGION 1..127: note = Synthetic

SEQ ID NO: 2310 - protein, 22 aa, synthetic construct
  REGION 1..22: note = Synthetic
AKAQRITIFGVVGPGRGHGMDV

SEQ ID NO: 2311 - protein, 108 aa, synthetic construct
  REGION 1..108: note = Synthetic
SYVLTQPPSVSVAPGQTARITCGGNNIGSKSVHWYQQKPGQAPVLVVYDDSDRPSGIPERFSGSNSGNTATLTISRVEAGDEADYYCQVWDSSSDLVVFGGGTKLTVL

SEQ ID NO: 2312 - protein, 11 aa, synthetic construct
  REGION 1..11: note = Synthetic
QVWDSSSDLVV

SEQ ID NO: 2313 - protein, 117 aa, synthetic construct; identical to SEQ ID NO: 469
  REGION 1..117: note = Synthetic

SEQ ID NO: 2314 - protein, 10 aa, synthetic construct
  REGION 1..10: note = Synthetic
ARPAGADMDV

SEQ ID NO: 2315 - protein, 106 aa, synthetic construct
  REGION 1..106: note = Synthetic
SYVLTQAPSVSVSPGQTASITCSGDKLGDKYAGWYQQRPGQSPVLVIYQDSKRPSGIPERFSGSNSGNTATLTISGTQAMDEADYYCQAWDSSTVVFGGGTKLTVL

SEQ ID NO: 2316 - protein, 9 aa, synthetic construct
  REGION 1..9: note = Synthetic
QAWDSSTVV

SEQ ID NO: 2317 - protein, 122 aa, synthetic construct
  REGION 1..122: note = Synthetic
QVQLQESGPGLVKPSETLSLTCTVSGGSISSYHWSWIRQPPGKGLEWIGYIYDSGSTNYNPSLKSRVTISVDTSKNQFSLKLSSVTAADTAVYYCARGCNNNSCYYKWFDPWGQGTLVTVSS

SEQ ID NO: 2318 - protein, 16 aa, synthetic construct
  REGION 1..16: note = Synthetic
ARGCNNNSCYYKWFDP

SEQ ID NO: 2319 - protein, 108 aa, synthetic construct
  REGION 1..108: note = Synthetic
SYVLTQPPSVSVAPGQTARITCGGNNIGSKSVHWYQQKPGQAPVLVVDDDSDRPSGIPERFSGSNSGNTATLTISRVEAGDEADYYCQVWDSSSDHYVFGTGTKVTVL

SEQ ID NO: 2320 - protein, 11 aa, synthetic construct
  REGION 1..11: note = Synthetic
QVWDSSSDHYV

SEQ ID NO: 2321 - protein, 121 aa, synthetic construct
  REGION 1..121: note = Synthetic
QVQLVQSGAEVKKPGASVKVSCKVSGYTLPEISMHWVRQAPGKGLEWMGGFDPEDGETIYAQKFQGRIIMTEETSTDTAYMELSSLKSDDTAFYYCVGSSPHKTNNWFDPWGQGTLVTVSS

SEQ ID NO: 2322 - protein, 14 aa, synthetic construct
  REGION 1..14: note = Synthetic
VGSSPHKTNNWFDP

SEQ ID NO: 2323 - protein, 108 aa, synthetic construct
  REGION 1..108: note = Synthetic
SYVLTQPPSVSVAPGQTARITCGGNNIGSKSVHWYQQKPGQAPVLVVYDDSDRPSGIPERFSGSNSGNTATLTISRVEAGDEADYYCQLWDNYSDHVVFGGGTKLTVL

SEQ ID NO: 2324 - protein, 11 aa, synthetic construct
  REGION 1..11: note = Synthetic
QLWDNYSDHVV

SEQ ID NO: 2325 - protein, 124 aa, synthetic construct
  REGION 1..124: note = Synthetic
QVQLVQSGAEVKKPGASVKVSCKASGYTFTSYGISWVRQAPGQGLEWMGWISAYNGNTNYAQKLQGRVTMTTDTSTSTAYMELRSLRSDDTAMYYCARVPSDAYYDDRTDFDYWGQGTLVTVSS

SEQ ID NO: 2326 - protein, 17 aa, synthetic construct
  REGION 1..17: note = Synthetic
ARVPSDAYYDDRTDFDY

SEQ ID NO: 2327 - protein, 106 aa, synthetic construct
  REGION 1..106: note = Synthetic
SYVLTQPPSVSVSPGQTASITCSGDTLEDKYTCWYQQKPGQSPVLVIYQDSKRPSGILERFFGSNSGNTATLTISGTQAMDEADYYCQAWDSSTAVFGGGTKLTVL

SEQ ID NO: 2328 - protein, 9 aa, synthetic construct
  REGION 1..9: note = Synthetic
QAWDSSTAV

SEQ ID NO: 2329 - protein, 128 aa, synthetic construct
  REGION 1..128: note = Synthetic
QVQLVQSGAEVKKPGASVKVSCKVSGYTLTELSMHWVRQAPGKGLEWMGGFDPEDAETIYAQKFQGRVTMTEDTSTDTAYMDLSSLRSEDTAVYYCVTAVAVAGSPSNYSYYYGMDDWGQGTTVTVSS

SEQ ID NO: 2330 - protein, 21 aa, synthetic construct
  REGION 1..21: note = Synthetic
VTAVAVAGSPSNYSYYYGMDD

SEQ ID NO: 2331 - protein, 110 aa, synthetic construct
  REGION 1..110: note = Synthetic
QSVLTQPPSASGTPGQRVTISCSGSSSNIGSNYVYWYQQLPGTAPKLLIYRNNQRPSGVPDRFSGSKSGTSASLAISGLRSEDEADYYCAAWDDSLSGWVFGGGTKLTVL

SEQ ID NO: 2332 - protein, 11 aa, synthetic construct
  REGION 1..11: note = Synthetic
AAWDDSLSGWV

SEQ ID NO: 2333 - protein, 121 aa, synthetic construct; identical to SEQ ID NO: 465
  REGION 1..121: note = Synthetic

SEQ ID NO: 2334 - protein, 14 aa, synthetic construct
  REGION 1..14: note = Synthetic
AKGRWTLTLGVMDV

SEQ ID NO: 2335 - protein, 111 aa, synthetic construct
  REGION 1..111: note = Synthetic
QXVLTQPASVSGSPGQSITISCTGTSSDVGGYNFVSWYQQHPGKAPKLMIYEVSNRPSGVSNRFSGSKSGNTASLTISGLQAEDEADYYCSSYTSSSTPYVFGTGTKVTVL

SEQ ID NO: 2336 - protein, 11 aa, synthetic construct
  REGION 1..11: note = Synthetic
SSYTSSSTPYV

SEQ ID NO: 2337 - protein, 129 aa, synthetic construct; identical to SEQ ID NO: 439
  REGION 1..129: note = Synthetic

SEQ ID NO: 2338 - protein, 22 aa, synthetic construct
  REGION 1..22: note = Synthetic
ARDGEMGGSYRYVDYYYYGMDV

SEQ ID NO: 2339 - protein, 106 aa, synthetic construct; identical to SEQ ID NO: 2247
  REGION 1..106: note = Synthetic

SEQ ID NO: 2340 - protein, 9 aa, synthetic construct
  REGION 1..9: note = Synthetic
QAWDSSTAV

SEQ ID NO: 2341 - protein, 126 aa, synthetic construct
  REGION 1..126: note = Synthetic
QVQLVQSGAEVKKPGASVKVSCKASGYTFTSYGISWVRQAPGQGLEWMGWISDYSGNTKYAQKIQGRVTMTTDTSTSTAYMELRSLRSDDTAVYYCARAPTFGVVIIRDINWFDPWGQGTLVTVSS

SEQ ID NO: 2342 - protein, 19 aa, synthetic construct
  REGION 1..19: note = Synthetic
ARAPTFGVVIIRDINWFDP

SEQ ID NO: 2343 - protein, 112 aa, synthetic construct
  REGION 1..112: note = Synthetic
QSVLTQPPSVSGAPGQRVTISCTGSSSNIGAGYDVHWYQQLPGTAPKLFIYANSNRPSGVPDRFSGSKSGTSASLAITGLQAEDEADYYCQSYDSSLSGFVVFGGGTKLTVL

SEQ ID NO: 2344 - protein, 12 aa, synthetic construct
  REGION 1..12: note = Synthetic
QSYDSSLSGFVV

SEQ ID NO: 2345 - protein, 119 aa, synthetic construct
  REGION 1..119: note = Synthetic
QVQLQESGPGLVKPSETLSLTCTVSGGSISSYYWSWIRRPAGKGLEWIGRIYTSGITHCNPSLKSRVTMSLDRSKNHFSLKLSSMTAADTAVYYCARGDYYDIHAFDIWGQGTMVTVSS

SEQ ID NO: 2346 - protein, 13 aa, synthetic construct
  REGION 1..13: note = Synthetic
ARGDYYDIHAFDI

SEQ ID NO: 2347 - protein, 106 aa, synthetic construct
  REGION 1..106: note = Synthetic
SYVLTQPPSVSVSPGQTASITCSGDKLGDKYTCWYQQKPGQSPVLVIYQDTKRPSGIPERFSGSNSGNTATLTISGTQAMDEADYYCQAWDSNTEVFGGGTKLTVL

SEQ ID NO: 2348 - protein, 9 aa, synthetic construct
  REGION 1..9: note = Synthetic
QAWDSNTEV

SEQ ID NO: 2349 - protein, 124 aa, synthetic construct; identical to SEQ ID NO: 459
  REGION 1..124: note = Synthetic

SEQ ID NO: 2350 - protein, 17 aa, synthetic construct
  REGION 1..17: note = Synthetic
ARVPSDAYYNDRTDFDY

SEQ ID NO: 2351 - protein, 106 aa, synthetic construct
  REGION 1..106: note = Synthetic
SYVLTQPPSVSVSPGQTASITCSGDKLEDKYACWYQQKPGQSPVLVIYQDSKRPSGIPERFSGSNSGNTATLTISVTQAMDEADYYCQAWDSSTAVFGGGTKLTVL

SEQ ID NO: 2352 - protein, 9 aa, synthetic construct
  REGION 1..9: note = Synthetic
QAWDSSTAV

SEQ ID NO: 2353 - protein, 122 aa, synthetic construct
  REGION 1..122: note = Synthetic
QVQLVQSGAEVKKPGASVKVSCKVSGYTLIELSMHWVRQAPGKGLEWMGGFDPEDVETIYAQNFQGRVTMTEDTSTDTAYMELSSLRSEDTAVYYCTTGYAIHSRGLSFDYWGQGTLVTVSS

SEQ ID NO: 2354 - protein, 15 aa, synthetic construct
  REGION 1..15: note = Synthetic
TTGYAIHSRGLSFDY

SEQ ID NO: 2355 - protein, 112 aa, synthetic construct
  REGION 1..112: note = Synthetic
QSVLTQPASVSGSPGQSITISCTGTSSDVGGYNYVSWYQQHPGKAPKLMIYAVSNRPSGVSNRFSGSKSGNTASLTISGLQAEDEADYYCSSYTSSSTPNWVFGGGTKLTVL

SEQ ID NO: 2356 - protein, 12 aa, synthetic construct
  REGION 1..12: note = Synthetic
SSYTSSSTPNWV

SEQ ID NO: 2357 - protein, 123 aa, synthetic construct
  REGION 1..123: note = Synthetic
EVQLLESGGDLVQPGGSLRLSCAASGFTFSSYAMSWVRQAPGKGLEWVSAISVTGGSTYYADSVKGRFTISRDNSKNTLYLQMNSLRAEDTAVYYCAKDQSSGIVGPTTGDYWGQGTLVTVSS

SEQ ID NO: 2358 - protein, 16 aa, synthetic construct
  REGION 1..16: note = Synthetic
AKDQSSGIVGPTTGDY

SEQ ID NO: 2359 - protein, 110 aa, synthetic construct
  REGION 1..110: note = Synthetic
QSVLTQPASVSGSPGQSITISCTGTSSDVGGYNYVSWYQQHPGKAPKLLIYDVSNRPSGVSNRFSGSKSGNTASLTISGLQAEGEADYYCSSYTSSSTLVFGTGTKVTVL

SEQ ID NO: 2360 - protein, 10 aa, synthetic construct
  REGION 1..10: note = Synthetic
SSYTSSSTLV

SEQ ID NO: 2361 - protein, 121 aa, synthetic construct; identical to SEQ ID NO: 449
  REGION 1..121: note = Synthetic

SEQ ID NO: 2362 - protein, 14 aa, synthetic construct
  REGION 1..14: note = Synthetic
ATGSPLVPESWFDP

SEQ ID NO: 2363 - protein, 106 aa, synthetic construct
  REGION 1..106: note = Synthetic
SYVLTQPPSVSVSPGQTASITCSGDKLGDKYACWYQQKPGQTPVLVIYQDSKRPSGIPERFSGSNSGNTATLTISGTQAMDEADYYCQAWDSSTVVFGGGTKLTVL

SEQ ID NO: 2364 - protein, 9 aa, synthetic construct
  REGION 1..9: note = Synthetic
QAWDSSTVV

SEQ ID NO: 2365 - protein, 123 aa, synthetic construct
  REGION 1..123: note = Synthetic
EVQLLESGGGLVQPGGSLRLSCAASGFTFSSYAMSWVRQAPGKGLEWVSGISVSGGSTYYADSVKGRFTISRDNSKNTLYLQMNSLRAEDTAVYYCAKDRYTGIAAAGNVDYWGQGTLVTVSS

SEQ ID NO: 2366 - protein, 16 aa, synthetic construct
  REGION 1..16: note = Synthetic
AKDRYTGIAAAGNVDY

SEQ ID NO: 2367 - protein, 110 aa, synthetic construct
  REGION 1..110: note = Synthetic
QSVLTQPPSVSEAPRQRVTISCSGSSSNIGNNAVNWYQQLPGKAPKLLIYYDDLLPSGVSDRFSGSKSGTSASLAISGLQSEDEADYYCAAWDDSLNGLVFGGGTKLTVL

SEQ ID NO: 2368 - protein, 11 aa, synthetic construct
  REGION 1..11: note = Synthetic
AAWDDSLNGLV

SEQ ID NO: 2369 - protein, 124 aa, synthetic construct; identical to SEQ ID NO: 471
  REGION 1..124: note = Synthetic

SEQ ID NO: 2370 - protein, 17 aa, synthetic construct
  REGION 1..17: note = Synthetic
AKDQDGIVGAPGNVFDY

SEQ ID NO: 2371 - protein, 106 aa, synthetic construct
  REGION 1..106: note = Synthetic
SYVLTQPPSVSVSPGQTASITCSGDTLGDKYTCWYQQKPGQSPVLVIYQDSKRPSGIPERFSGSNSGNTATLTISGTQAMDEADYYCQAWDSRNAVFGGGTKLTVL

SEQ ID NO: 2372 - protein, 9 aa, synthetic construct
  REGION 1..9: note = Synthetic
QAWDSRNAV

SEQ ID NO: 2373 - protein, 122 aa, synthetic construct
  REGION 1..122: note = Synthetic
QVQLVQSGAEVKKPGASVKVSCRVSGYTLTELSMHWVRQAPGKGLEWMGGFDPEDVETIYAQKFQGRVTMTEDTSTDTAYMELSSLRSEDTAVYYCATGYAIFGVARSADYWGQGTLVTISS

SEQ ID NO: 2374 - protein, 15 aa, synthetic construct
  REGION 1..15: note = Synthetic
ATGYAIFGVARSADY

SEQ ID NO: 2375 - protein, 110 aa, synthetic construct
  REGION 1..110: note = Synthetic
QSVLTQPPSVSAAPGQKVTISCSGSSSNIGNNYVSWYHQLPGTAPKLLIYDNNKRPSGIPDRFSGSKSGTSATLGITGLQTGDEADYYCGTWDSSLSAVVFGGGTKLTVL

SEQ ID NO: 2376 - protein, 11 aa, synthetic construct
  REGION 1..11: note = Synthetic
GTWDSSLSAVV

SEQ ID NO: 2377 - protein, 123 aa, synthetic construct
  REGION 1..123: note = Synthetic
EVQLLESGGGLVQPGGSLRLSCAASGFTFSSYALSWVRQAPGKGLEWVSAISVSGGSTYYADSVKGRFTISRDNSKNTLYLQMSSLRAEDTAVYYCAKVLRTYQLRVTAVDYWGQGTLVTVSS

SEQ ID NO: 2378 - protein, 16 aa, synthetic construct
  REGION 1..16: note = Synthetic
AKVLRTYQLRVTAVDY

SEQ ID NO: 2379 - protein, 109 aa, synthetic construct
  REGION 1..109: note = Synthetic
QSVLTQPASVSGSPGQSITISCTGTSSDVGGYNYVSWYQQHPGKAPKLMIYEVSNRPSGVSNRFSGSKSGNTASLTISGLQAEDEADYYCSSYTSSSYVFGTGTKVTVL

SEQ ID NO: 2380 - protein, 9 aa, synthetic construct
  REGION 1..9: note = Synthetic
SSYTSSSYV

SEQ ID NO: 2381 - protein, 121 aa, synthetic construct
  REGION 1..121: note = Synthetic
QVQLVESGGGVVQPGRSLRLSCAASGFTFSSYAMHWVRQAPGKGLEWVAVISYDGSNKYYADSVKGRFTISRDNSKNTLYLQMNSLRAEDTAVYYCAGSVSWSEIGAFDIWGQGTMVTVSS

SEQ ID NO: 2382 - protein, 14 aa, synthetic construct
  REGION 1..14: note = Synthetic
AGSVSWSEIGAFDI

SEQ ID NO: 2383 - protein, 106 aa, synthetic construct
  REGION 1..106: note = Synthetic
SYVLTQPPSVSVSPGQTASITCSGDKLGDKYACWYQQKPGQSPVLVIYEDFKRPSGIPERFSGSNSGNTATLTISGTQAMDEADYYCQAWDSSTVVFGGGTKLTVL

SEQ ID NO: 2384 - protein, 9 aa, synthetic construct
  REGION 1..9: note = Synthetic
QAWDSSTVV

SEQ ID NO: 2385 - protein, 128 aa, synthetic construct
  REGION 1..128: note = Synthetic
QVQLVESGGGVVQPGESLRLSCAASGFSFSRYGMHWVRQAPGKGLEWVAFIRYDGSNRYYTDSLKGRFTVSRDNSKNTLYLQMNSLRAEDTAVYYCAKDSEIYCGGDCPPQNNWFDFWGQGTLVTVSS

SEQ ID NO: 2386 - protein, 21 aa, synthetic construct
  REGION 1..21: note = Synthetic
AKDSEIYCGGDCPPQNNWFDF

SEQ ID NO: 2387 - protein, 105 aa, synthetic construct
  REGION 1..105: note = Synthetic
SYVLTQPPSVSVSPGQTASITCSGDKLGDKYACWYQQKPGQSPVLVIYQDTKRPSGIPERFSGSNSGNTATLTISGTQAMDEADYYCQAWDSSVVFGGGTKLTVL

SEQ ID NO: 2388 - protein, 8 aa, synthetic construct
  REGION 1..8: note = Synthetic
QAWDSSVV

SEQ ID NO: 2389 - protein, 120 aa, synthetic construct
  REGION 1..120: note = Synthetic
QVQLQESGPGLVKPSGTLSLTCAVSGGSISSSNWWSWVRQPPGKGLEWIGEIYHSGNTNYNPSLKSRVTISVDKSKNQFSLKLSSVTAADTAVYYCARDQGATRRELAYWGQGTLVTVSS

SEQ ID NO: 2390 - protein, 13 aa, synthetic construct
  REGION 1..13: note = Synthetic
ARDQGATRRELAY

SEQ ID NO: 2391 - protein, 110 aa, synthetic construct
  REGION 1..110: note = Synthetic
QSVLTQPASVSGSPGQSITISCTGTSSDVGSYNLVSWYQQHPGKAPKLMIYEVSKRPSGLSNRFSGSKSGNTASLTISGLQAEDEADYYCCSYAGSSTWVFGGGTKLTVL

SEQ ID NO: 2392 - protein, 10 aa, synthetic construct
  REGION 1..10: note = Synthetic
CSYAGSSTWV

SEQ ID NO: 2393 - protein, 111 aa, synthetic construct
  REGION 1..111: note = Synthetic
QVQLQESGPGLVKPSGTLSLTCAVSGGSISSSNWWSWVRQPPGKGLEWIGEIYHSGSTNYNPSLKSRVTISVDKSKNQLSLKLSSVTAADTAVYYCVLSLHQGPIGLPPGT

SEQ ID NO: 2394 - skipped

SEQ ID NO: 2395 - protein, 110 aa, synthetic construct
  REGION 1..110: note = Synthetic
QSVLTQPASVSGSPGQSITISCTGTSSDVGSYNLVSWYQQHPGKAPKLMIYEGIKRPSGVSNRFSGSKSGNTASLTISGLQAEDEAEYYCCSYAGSSTWVFGGGTKLTVL

SEQ ID NO: 2396 - protein, 10 aa, synthetic construct
  REGION 1..10: note = Synthetic
CSYAGSSTWV

SEQ ID NO: 2397 - protein, 125 aa, synthetic construct; identical to SEQ ID NO: 451
  REGION 1..125: note = Synthetic

SEQ ID NO: 2398 - protein, 18 aa, synthetic construct
  REGION 1..18: note = Synthetic
ATAPPYCSGGSCSNWLDP

SEQ ID NO: 2399 - protein, 109 aa, synthetic construct
  REGION 1..109: note = Synthetic
SYVLTQPPSVSVAPGQTARITCGGNNIGSKSVHWYQQKPGQAPVLVVYDDSDRPSGIPERFSGSNSGNTATLTISRVEAGDEADYYCQVWDSSPDHPVVFGGGTKLTVL

SEQ ID NO: 2400 - protein, 12 aa, synthetic construct
  REGION 1..12: note = Synthetic
QVWDSSPDHPVV

SEQ ID NO: 2401 - protein, 125 aa, synthetic construct; identical to SEQ ID NO: 451
  REGION 1..125: note = Synthetic

SEQ ID NO: 2402 - protein, 18 aa, synthetic construct
  REGION 1..18: note = Synthetic
ATAPPYCSGGSCSNWLDP

SEQ ID NO: 2403 - protein, 109 aa, synthetic construct
  REGION 1..109: note = Synthetic
SYVLTQPPSVSVAPGQTARITCGGNNIGSKSVHWYQQKPGQAPVLVVYDDSDRPSGIPERFSGSNSGNTATLTISRVEAGDEADYYCQVWDSSPDHAVVFGGGTKLTVL

SEQ ID NO: 2404 - protein, 12 aa, synthetic construct
  REGION 1..12: note = Synthetic
QVWDSSPDHAVV

SEQ ID NO: 2405 - protein, 117 aa, synthetic construct; identical to SEQ ID NO: 481
  REGION 1..117: note = Synthetic

SEQ ID NO: 2406 - protein, 10 aa, synthetic construct
  REGION 1..10: note = Synthetic
ARDGGGYFDY

SEQ ID NO: 2407 - protein, 106 aa, synthetic construct
  REGION 1..106: note = Synthetic
SYVLTQPPSVSVSPGQTASITCSGDKLGDKYACWYQQKPGQSPVLVIYQDSKRPSGIPERFSGSNSGNTATLTISGTQAMDEADYHCQAWDSSTVVFGGGTKLTVL

SEQ ID NO: 2408 - protein, 9 aa, synthetic construct
  REGION 1..9: note = Synthetic
QAWDSSTVV

SEQ ID NO: 2409 - protein, 125 aa, synthetic construct
  REGION 1..125: note = Synthetic
EVQLVQSGAEVKKPGESLRISCKGSGYSFTHYWISWVRQMPGKGXEWXGRIDPSEFYTNFIPSFQGHVTISADKSITTAYLQWSSLKASDTAIYYCAREPRITIFGVMENWFDPWGQGTLVTVSS

SEQ ID NO: 2410 - protein, 18 aa, synthetic construct
  REGION 1..18: note = Synthetic
AREPRITIFGVMENWFDP

SEQ ID NO: 2411 - protein, 110 aa, synthetic construct
  REGION 1..110: note = Synthetic
QFVLTQPPSASGTPGQRVTISCSGSSSNIGSNYVYWYQQLPGTAPKLLIYSNNQRPSGVPDRFSGSKXGTSASLAISGIRSEDEXDYYCAACDDSMSGWVFGGGTKLTVL

SEQ ID NO: 2412 - protein, 11 aa, synthetic construct
  REGION 1..11: note = Synthetic
AACDDSMSGWV

SEQ ID NO: 2413 - protein, 128 aa, synthetic construct
  REGION 1..128: note = Synthetic
QVQLVQSGAEVKKPGASVKVSCKVSGYTLTELSMHWVRQAPGKGLEWMGGFDPEDGETIYAQKFQGRVTMTEDTSTDTAYMELSSLRSEDTAVYYCATAVAVVGTPSYYYYYYGMDVWGQGTTVTVSS

SEQ ID NO: 2414 - protein, 21 aa, synthetic construct
  REGION 1..21: note = Synthetic
ATAVAVVGTPSYYYYYYGMDV

SEQ ID NO: 2415 - protein, 110 aa, synthetic construct
  REGION 1..110: note = Synthetic
QSVLTQPPSASGTPGQRVTISCSGSSSNIGSNYVYWYQQSPGTAPKLLIYRNDQQPSGVPDRFSGSKSGTSASLAISGLRSEDEADYYCAAWDDSLSGWVFGGGTKLTVL

SEQ ID NO: 2416 - protein, 11 aa, synthetic construct
  REGION 1..11: note = Synthetic
AAWDDSLSGWV

SEQ ID NO: 2417 - protein, 117 aa, synthetic construct; identical to SEQ ID NO: 475
  REGION 1..117: note = Synthetic

SEQ ID NO: 2418 - protein, 10 aa, synthetic construct
  REGION 1..10: note = Synthetic
AKDRGGYLQH

SEQ ID NO: 2419 - protein, 106 aa, synthetic construct
  REGION 1..106: note = Synthetic
SYVLTQPPSVSVSPGQTASITCSGDKLGDKYACWYQQKPGQSPVLVIYQDTKRPSGIPERFSGSNSGNTATLTISGTQAMDEADYYCQAWDSSTYVFGTGTKVTVL

SEQ ID NO: 2420 - protein, 9 aa, synthetic construct
  REGION 1..9: note = Synthetic
QAWDSSTYV

SEQ ID NO: 2421 - protein, 123 aa, synthetic construct
  REGION 1..123: note = Synthetic
QVQLVQSGAEVKKPGSSVKVSCKASGGTFSSYAMSWVRQAPGQGLEWMGGIIPIFGTANYAQKFQGRVTITADESTAYMELSSLRSEDTAVYYCALEGYCSSTSCYAGGVEYWGQGTLVTVSS

SEQ ID NO: 2422 - protein, 18 aa, synthetic construct
  REGION 1..18: note = Synthetic
ALEGYCSSTSCYAGGVEY

SEQ ID NO: 2423 - protein, 112 aa, synthetic construct
  REGION 1..112: note = Synthetic
QSVLTQSPSASASLGASVKLTCTLSSGHSSYAIAWHQQQPEKGPRYLMKVNSDGSHSKGDGIPDRFSGSSSGAERYLTISSLQSEDEADYYCQTWGTGIQRVFGGGTKLTVL

SEQ ID NO: 2424 - protein, 10 aa, synthetic construct
  REGION 1..10: note = Synthetic
QTWGTGIQRV

SEQ ID NO: 2425 - protein, 118 aa, synthetic construct
  REGION 1..118: note = Synthetic
QVQLVQSGAEVKKPGASVKVSCKASGYTFTNYDISWVRQAPGQGLEWMGRISADNGNTNYAQKVQGRVTMTTDTSTSTAYMELRSLRSDDTAVYYCARDVHPWAFDYWGQGTLVTVSS

SEQ ID NO: 2426 - protein, 11 aa, synthetic construct
  REGION 1..11: note = Synthetic
ARDVHPWAFDY

SEQ ID NO: 2427 - protein, 107 aa, synthetic construct
  REGION 1..107: note = Synthetic
AIQLTQSPSSLSASVADRVTITCRASQGISSTLAWYQQKPGKAPELLIYDASSLKSGVPSRFSGSGSGTDFTLTISSLQPEDFATYYCQQFNNYPLTFGGGTKVEIK

SEQ ID NO: 2428 - protein, 9 aa, synthetic construct
  REGION 1..9: note = Synthetic
QQFNNYPLT

SEQ ID NO: 2429 - protein, 122 aa, synthetic construct
  REGION 1..122: note = Synthetic
QVQLVQSGAEVKKPGASVKVSCKVSGYTLIELSMHWVRQAPGKGLEWMGGFDPXDGETIYAQKFQGRVTMTEDTSTDTAYMELSSLRSEDTAVYYCATAGPLPYYYYAMDVWGQGTTVTVSS

SEQ ID NO: 2430 - protein, 15 aa, synthetic construct
  REGION 1..15: note = Synthetic
ATAGPLPYYYYAMDV

SEQ ID NO: 2431 - protein, 109 aa, synthetic construct
  REGION 1..109: note = Synthetic
EIVLTQSPGTLSLSPGERATLSCRASQSVSSSYLAWYQQKPGQAPRLLIYGASSRATGIPDRFSGSGSGTDFTLTISRLEPEDFAVYYCQQYGSSPMYTFGQGTKLEIK

SEQ ID NO: 2432 - protein, 10 aa, synthetic construct
  REGION 1..10: note = Synthetic
QQYGSSPMYT

SEQ ID NO: 2433 - protein, 124 aa, synthetic construct; identical to SEQ ID NO: 431
  REGION 1..124: note = Synthetic

SEQ ID NO: 2434 - protein, 17 aa, synthetic construct
  REGION 1..17: note = Synthetic
ARGARFLEWLPQSPFDY

SEQ ID NO: 2435 - protein, 106 aa, synthetic construct; identical to SEQ ID NO: 432
  REGION 1..106: note = Synthetic

SEQ ID NO: 2436 - protein, 9 aa, synthetic construct
  REGION 1..9: note = Synthetic
QQYYSTPLT

SEQ ID NO: 2437 - protein, 122 aa, synthetic construct
  REGION 1..122: note = Synthetic
QVQLVESGGGVVQPGRSLRLSCAASGFTFSSYGMHWVRQAPGKGLEWVAVISYDGSNKYYADSVKGRFTISRDNSKNTLYLQMNSLRAEDTAVYYCAKGRLIVVVMGAFDIWGQGTMVTVSS

SEQ ID NO: 2438 - protein, 15 aa, synthetic construct
  REGION 1..15: note = Synthetic
AKGRLIVVVMGAFDI

SEQ ID NO: 2439 - protein, 112 aa, synthetic construct
  REGION 1..112: note = Synthetic
DIVMTQSPLSLPVTPGEPASISCRSSQSLLHSNGYNYLDWYLQKPGQSPQLLIYLGSNRASGVPDRFSGSGSGTDFTLKISRVEAEDVGVYYCMQALQTAYTFGQGTKLEIK

SEQ ID NO: 2440 - protein, 9 aa, synthetic construct
  REGION 1..9: note = Synthetic
MQALQTAYT

SEQ ID NO: 2441 - protein, 123 aa, synthetic construct
  REGION 1..123: note = Synthetic
EVQLLESGGGLVQPGGSLRLSCAASGFTFTSYAMSWVRQAPGKGLEWVSTISITGGSTYYADSVKGRFTISRDNSKYTLYLQMNSLRAEDTAVYYCAKDPYSGISYYYYMDVWGKGTAVTVSS

SEQ ID NO: 2442 - protein, 16 aa, synthetic construct
  REGION 1..16: note = Synthetic
AKDPYSGISYYYYMDV

SEQ ID NO: 2443 - protein, 108 aa, synthetic construct; identical to SEQ ID NO: 486
  REGION 1..108: note = Synthetic

SEQ ID NO: 2444 - protein, 9 aa, synthetic construct
  REGION 1..9: note = Synthetic
QQYGSSPRT

SEQ ID NO: 2445 - protein, 120 aa, synthetic construct
  REGION 1..120: note = Synthetic
QVQLVESGGGVVQPGGSLRLSCAASGFTFSTYDMNWVRQAPGKGLEWVAFIRYDGSNKYYADSVKGRFTISRDNSKNTLYLQMNSLRAEDTAVYYCAARYLGAPDYGMDVWGQGTTVTVS

SEQ ID NO: 2446 - protein, 14 aa, synthetic construct
  REGION 1..14: note = Synthetic
AARYLGAPDYGMDV

SEQ ID NO: 2447 - protein, 112 aa, synthetic construct
  REGION 1..112: note = Synthetic
DIVMTQSPLSLPVTPGEPASISCRSSQSLLHTNGYNYLDWYLQKPGQSPQLLIYLGSNRASGVPDRFSGSGSGTDFTLKISRVEAEDVGIFYCMQALQTPRTFGQGTKVEIK

SEQ ID NO: 2448 - protein, 9 aa, synthetic construct
  REGION 1..9: note = Synthetic
MQALQTPRT

SEQ ID NO: 2449 - protein, 120 aa, synthetic construct
  REGION 1..120: note = Synthetic
QVQLVQSGAEVKKPGASVKVSCKASGYTFTSYGISWVRQAPGQGLEWMGWISSYNGNRNYAQKLQGRVTMTTDTSTSTAYMELRSLRSDDTAMYYCARDRLWLGESLDYWGQGTLVTVSS

SEQ ID NO: 2450 - protein, 13 aa, synthetic construct
  REGION 1..13: note = Synthetic
ARDRLWLGESLDY

SEQ ID NO: 2451 - protein, 107 aa, synthetic construct
  REGION 1..107: note = Synthetic
DIQMTQSPSSLSASVGDRVTITCRASQGIGNDLGWYQQKPGKAPKRLIYAASSLQSGVPSRFSGSGSGTEFTLTISSLQPEDFATYYCLQHSSYPLTFGGGTKVEIK

SEQ ID NO: 2452 - protein, 9 aa, synthetic construct
  REGION 1..9: note = Synthetic
LQHSSYPLT

SEQ ID NO: 2453 - protein, 121 aa, synthetic construct
  REGION 1..121: note = Synthetic
QVQLVQSGAEVKKPGASVKVSCKISGYTLTELSMHWVRQAPGKGLEWMGGLDLEDGETIYAQKFQGRVTMTEDTSTDTAYMELSSLRSEDTAVYYCATDHRDGFQSGGEYWGQGTLVTVSS

SEQ ID NO: 2454 - protein, 14 aa, synthetic construct
  REGION 1..14: note = Synthetic
ATDHRDGFQSGGEY

SEQ ID NO: 2455 - protein, 108 aa, synthetic construct
  REGION 1..108: note = Synthetic
DIQMTQSPSSLSASVGDRVTITCRASQGIRNDLGWYQQKPGKAPKRLIYAASSLQSGVPSRFSGSGSGTEFTLTISSLQPEDFATYYCLQHNSYPEWTFGQGTKVEIK

SEQ ID NO: 2456 - protein, 10 aa, synthetic construct
  REGION 1..10: note = Synthetic
LQHNSYPEWT

SEQ ID NO: 2457 - protein, 126 aa, synthetic construct
  REGION 1..126: note = Synthetic
QVQLQESGPGLVKPSQTLSLTCTVSGGSISSGGYYWSWIRQHPGKGLEWIGYIYYSGSTYYNPSLKSRVTISVDTSKNQFSLKLSSVTAADTAVYYCARVEGLYYYDSSGQTFDYWGQGTLVTVSS

SEQ ID NO: 2458 - protein, 18 aa, synthetic construct
  REGION 1..18: note = Synthetic
ARVEGLYYYDSSGQTFDY

SEQ ID NO: 2459 - protein, 108 aa, synthetic construct
  REGION 1..108: note = Synthetic
EIVMTQSPATLSVSPGERATLSCRASQSVRSXLAWYQQKPGQAPRLLIYGASTRATGIPARFSGSGSGTEFTLTISSLQSEDFAVYYCQQYNNWPPITFGQGTRLEIK

SEQ ID NO: 2460 - protein, 10 aa, synthetic construct
  REGION 1..10: note = Synthetic
QQYNNWPPIT

SEQ ID NO: 2461 - protein, 131 aa, synthetic construct
  REGION 1..131: note = Synthetic
QVQLVQSGAEVKKPGASVKVSCKVSGYTLVELSIHWVRQAPGKGLEWMGGFDPEEGEAIYAQRFQGRVTMTEDTSTDTAYMEMSSLRSEDTAVYYCASVPAAIRVEARKLNYYSYYGMDVWGQGTTVTVSS

SEQ ID NO: 2462 - protein, 24 aa, synthetic construct
  REGION 1..24: note = Synthetic
ASVPAAIRVEARKLNYYSYYGMDV

SEQ ID NO: 2463 - protein, 108 aa, synthetic construct
  REGION 1..108: note = Synthetic
EIVLTQSPATLSLSPGERATLSCRASQSVSNYLAWYQQKPGQAPRLLIYDASNRATGIPARFSGSGSGTDFTLTISSLEPEDFAIYYCQQRSNWPEITFGGGTKVEIK

SEQ ID NO: 2464 - protein, 10 aa, synthetic construct
  REGION 1..10: note = Synthetic
QQRSNWPEIT

SEQ ID NO: 2465 - protein, 122 aa, synthetic construct; identical to SEQ ID NO: 427
  REGION 1..122: note = Synthetic

SEQ ID NO: 2466 - protein, 15 aa, synthetic construct
  REGION 1..15: note = Synthetic
ARDHRTVTTFGTFDY

SEQ ID NO: 2467 - protein, 107 aa, synthetic construct; identical to SEQ ID NO: 428
  REGION 1..107: note = Synthetic

SEQ ID NO: 2468 - protein, 9 aa, synthetic construct
  REGION 1..9: note = Synthetic
QQSYSTPFT

SEQ ID NO: 2469 - protein, 122 aa, synthetic construct
  REGION 1..122: note = Synthetic
QVQLQESGPGLVKPSQTLSLTCTVSGDSISSGGYYWSWIRQHPGKGLEWIGYIYYSGDTYYNPSLKSRVTISVDTSKNQFSLKLSSVTGADTAVYYCARGLEDDFWGWFDPWGQGTLVTVSS

SEQ ID NO: 2470 - protein, 14 aa, synthetic construct
  REGION 1..14: note = Synthetic
ARGLEDDFWGWFDP

SEQ ID NO: 2471 - protein, 107 aa, synthetic construct
  REGION 1..107: note = Synthetic
DIQMTQSPSTLSASVGDRVTITCRASQSISSWLAWYQQKPGKAPKLLIYKASSLESGVPSRFSGSGSGTEFTLTISSLQPDDFATYYCQQYNSYPYTFGQGTKLEIK

SEQ ID NO: 2472 - protein, 9 aa, synthetic construct
  REGION 1..9: note = Synthetic
QQYNSYPYT

SEQ ID NO: 2473 - protein, 125 aa, synthetic construct
  REGION 1..125: note = Synthetic
QLQLQESGPGLVKPSETLSLTCTVSGGSISSSSSSYYWGWIRQPPGKGLEWIGNIYYSGSTYYNPSLKSRVTISVDTSKNQFSLKLSSVTAADTAVYYCARHGDTYYYDSTLDYWGQGTLVTVSS

SEQ ID NO: 2474 - protein, 15 aa, synthetic construct
  REGION 1..15: note = Synthetic
ARHGDTYYYDSTLDY

SEQ ID NO: 2475 - protein, 107 aa, synthetic construct; identical to SEQ ID NO: 326
  REGION 1..107: note = Synthetic

SEQ ID NO: 2476 - protein, 9 aa, synthetic construct
  REGION 1..9: note = Synthetic
LQHNSYPLT

SEQ ID NO: 2477 - protein, 124 aa, synthetic construct
  REGION 1..124: note = Synthetic
QVQLQQWGAGLVKPSETLSLTCEVYGGSFSGYYWSWIRQPPGKGLEWIGEINHSGSTNYNPSLKSRVTISVDTSKNQFSLKLSSVTAADTAVYYCARGRLNGYYRHGHFGLDYWGQGILVTVSS

SEQ ID NO: 2478 - protein, 18 aa, synthetic construct
  REGION 1..18: note = Synthetic
ARGRLNGYYRHGHFGLDY

SEQ ID NO: 2479 - protein, 114 aa, synthetic construct
  REGION 1..114: note = Synthetic
DVVMTQSPLSLPVXLGQPASISCRSSQSLVYSDGNTYLNWFQQRPGQSPRRLIYKVSNRDSGVPDRFSGSGSGADFTLKISRVEAEDVGLYYCMQGTHWPPMYTFGQGTKLEIK

SEQ ID NO: 2480 - protein, 11 aa, synthetic construct
  REGION 1..11: note = Synthetic
MQGTHWPPMYT

SEQ ID NO: 2481 - protein, 121 aa, synthetic construct
  REGION 1..121: note = Synthetic
QVQLVQSGAEVKKPGASVKVSCKVSGYTLTELSMHWVRQAPGKGLEWMGGFDPEDGETIYAQKFQGRVTMTEDTSTDTAYMELSSLRSEDTAVYYCATSPAVVAANWFDPWGQGTLVTVSS

SEQ ID NO: 2482 - protein, 14 aa, synthetic construct
  REGION 1..14: note = Synthetic
ATSPAVVAANWFDP

SEQ ID NO: 2483 - protein, 108 aa, synthetic construct
  REGION 1..108: note = Synthetic
EIVLTQSPGTLSLSPGERATLSCRASQSVTSNSLAWYQQKPGQAPRLLIYGASSRGTGIPDRFSGSGSGTDFTLTISRLEPEDFAVYYCQQYVNSPFTFGPGTTVEIK

SEQ ID NO: 2484 - protein, 9 aa, synthetic construct
  REGION 1..9: note = Synthetic
QQYVNSPFT

SEQ ID NO: 2485 - protein, 128 aa, synthetic construct; identical to SEQ ID NO: 423
  REGION 1..128: note = Synthetic

SEQ ID NO: 2486 - protein, 21 aa, synthetic construct
  REGION 1..21: note = Synthetic
ARPDCVNCCSGGSCYFDAFDI

SEQ ID NO: 2487 - protein, 113 aa, synthetic construct; identical to SEQ ID NO: 424
  REGION 1..113: note = Synthetic

SEQ ID NO: 2488 - protein, 9 aa, synthetic construct
  REGION 1..9: note = Synthetic
MQRIEFPWT

SEQ ID NO: 2489 - protein, 121 aa, synthetic construct
  REGION 1..121: note = Synthetic
QVQLQQWGAGLLKPSETLSLTCAVYGGSFSGYYWSWIRQPPGKGLEWIGEIIHSGSTNYNPSLKSRVTISLDTSKNHFSLKLSSVTAADTAVYYCARKGPFVVVPAGFDPWGQGTLVTVSS

SEQ ID NO: 2490 - protein, 15 aa, synthetic construct
  REGION 1..15: note = Synthetic
ARKGPFVVVPAGFDP

SEQ ID NO: 2491 - protein, 107 aa, synthetic construct
  REGION 1..107: note = Synthetic
DIQMTQSPSSLSASVGDRVTITCRASQSISSYLNWYQQKPGKAPKLLIYAASSLQSGVPSRFSGSGSGTDFTLTISSLQPEDFASYYCQQSYSTPWTFGQGTKVEIK

SEQ ID NO: 2492 - protein, 9 aa, synthetic construct
  REGION 1..9: note = Synthetic
QQSYSTPWT

SEQ ID NO: 2493 - protein, 121 aa, synthetic construct
  REGION 1..121: note = Synthetic
QVQLVQSGAEVKKPGASVKVSCKVSGYTLIELSMHWVRQAPGKGLEWMGGFDPEDAKTIYAQKFQGRVTMTEDTSTDTAYMELSSLRSEDTAVYYCATLPAIFGVVIWGHWGQGTLVTVSS

SEQ ID NO: 2494 - protein, 14 aa, synthetic construct
  REGION 1..14: note = Synthetic
ATLPAIFGVVIWGH

SEQ ID NO: 2495 - protein, 114 aa, synthetic construct
  REGION 1..114: note = Synthetic
DIVMTQSPDSLAVSLGERATINCKSSQSVLYSSNNKNYLAWYQQKPGQPPKLLIYWASTRESGVPDRFSGSGSGTDFTLTISSLQAEDVAVYYCQQYYTTLALTFGGGTKVEIK

SEQ ID NO: 2496 - protein, 10 aa, synthetic construct
  REGION 1..10: note = Synthetic
QQYYTTLALT

SEQ ID NO: 2497 - protein, 127 aa, synthetic construct
  REGION 1..127: note = Synthetic
EVQLVESGGGLVKPGGSLRLSCAASGFTFSNAWMSWVRQAPGKGLEWVGRIRSKTDGGTTDFAAPVKGRFTISRDDSKNTLYLQMNSLKTEDTAVYYCTTDPSYYDYVWGSYPSGYWGQGTLVTVSS

SEQ ID NO: 2498 - protein, 18 aa, synthetic construct
  REGION 1..18: note = Synthetic
TTDPSYYDYVWGSYPSGY

SEQ ID NO: 2499 - protein, 107 aa, synthetic construct
  REGION 1..107: note = Synthetic
DIQMTQSPSSLSASVGDRVTITCQASQDISNSLNWYQHKPGKAPNLLIYDASNLETGVPSRFSGSGSGTDFTFSISSLQPEDIATYFCQQYVNLPYTFGQGTKLEIK

SEQ ID NO: 2500 - protein, 9 aa, synthetic construct
  REGION 1..9: note = Synthetic
QQYVNLPYT

SEQ ID NO: 2501 - protein, 124 aa, synthetic construct; identical to SEQ ID NO: 457
  REGION 1..124: note = Synthetic

SEQ ID NO: 2502 - protein, 17 aa, synthetic construct
  REGION 1..17: note = Synthetic
ARMNSGTLVNGELTSDY

SEQ ID NO: 2503 - protein, 107 aa, synthetic construct; identical to SEQ ID NO: 458
  REGION 1..107: note = Synthetic

SEQ ID NO: 2504 - protein, 9 aa, synthetic construct
  REGION 1..9: note = Synthetic
QQSYITPIT

SEQ ID NO: 2505 - protein, 123 aa, synthetic construct; identical to SEQ ID NO: 425
  REGION 1..123: note = Synthetic

SEQ ID NO: 2506 - protein, 15 aa, synthetic construct
  REGION 1..15: note = Synthetic
ARHGDTYYYESTLDY

SEQ ID NO: 2507 - protein, 107 aa, synthetic construct; identical to SEQ ID NO: 326
  REGION 1..107: note = Synthetic

SEQ ID NO: 2508 - protein, 9 aa, synthetic construct
  REGION 1..9: note = Synthetic
LQHNSYPLT

SEQ ID NO: 2509 - protein, 127 aa, synthetic construct
  REGION 1..127: note = Synthetic
QVQLVESGGGVVQPGGSLRLSCAASGFTFSSYGMHWVRQAPGKGLEWVAFIRYDGSNKYYADSVKGRFTISRDNSKNTLYLQMNSLRAEDTAVYYCASAYGDYITEPYYYYYGMDVWGQGTTVTVSS

SEQ ID NO: 2510 - protein, 20 aa, synthetic construct
  REGION 1..20: note = Synthetic
ASAYGDYITEPYYYYYGMDV

SEQ ID NO: 2511 - protein, 109 aa, synthetic construct
  REGION 1..109: note = Synthetic
EIVLTQSPGTLSLSPGERATLSCRASQSVSSSYLAWYQQKPGQAPRLLIYGASSRATGIPDRFSGSGSGTDFTLTISRLEPEDFAVYYCQQYGSSPPYTFGQGTKLEIK

SEQ ID NO: 2512 - protein, 10 aa, synthetic construct
  REGION 1..10: note = Synthetic
QQYGSSPPYT

SEQ ID NO: 2513 - protein, 125 aa, synthetic construct
  REGION 1..125: note = Synthetic
QVQLVQSGAEVKKPGASVKVSCKVSGYTLTELSMHWVRQAPGKGLEWMGGFDPEDVETIYAQKFQGRVTMTEDTSTDTAYMELTSLRSEDTAVYYCATMPAWVGASTGYYYMDVWGKGTTVTVSS

SEQ ID NO: 2514 - protein, 18 aa, synthetic construct
  REGION 1..18: note = Synthetic
ATMPAWVGASTGYYYMDV

SEQ ID NO: 2515 - protein, 111 aa, synthetic construct
  REGION 1..111: note = Synthetic
EIVLTQSPGTLSLSPGERATLSCRASQSVSSNYLAWYQQKPGQAPRLLIYGASSRATGIPDRFSGSGSGTDFTLIISRLEPEDFAVYYCQQYGSSPPPMYTFGQGTKLEIK

SEQ ID NO: 2516 - protein, 12 aa, synthetic construct
  REGION 1..12: note = Synthetic
QQYGSSPPPMYT

SEQ ID NO: 2517 - protein, 125 aa, synthetic construct
  REGION 1..125: note = Synthetic
EVQLVESGGGLIRPGGSLRLSCAASGFTVSSNYMNWVRQAPGKGLEWVSVIYSGGSTNYADSVKGRFTISRDNSKNTLYLQMNSLRAEDTAVYYCARGDPYCGGDCPQGDAFDIWGQGTMVTVSS

SEQ ID NO: 2518 - protein, 19 aa, synthetic construct
  REGION 1..19: note = Synthetic
ARGDPYCGGDCPQGDAFDI

SEQ ID NO: 2519 - protein, 106 aa, synthetic construct
  REGION 1..106: note = Synthetic
DIQMTQSPXXLSASVGDRVTITCRASQSISSWLAWYQQKPGKAPKLLIYKASSLESGVPSRFSGSGSGTEFTLTISSLQPDDFATYYCQQYNSYWTFGQGTKVEIK

SEQ ID NO: 2520 - protein, 8 aa, synthetic construct
  REGION 1..8: note = Synthetic
QQYNSYWT

SEQ ID NO: 2521 - protein, 128 aa, synthetic construct
  REGION 1..128: note = Synthetic
EVQLVESGGGLVKPGGSLRLSCAASGFTFSSYTMNWVRQAPGKGLEWVSSISRSSSYIYYADSVKGRFTISRDNAKNSLYLQMNSLRAEDTAVYYCARDSARWFYDSSGYYPSDFDYWGQGTLVTVSS

SEQ ID NO: 2522 - protein, 21 aa, synthetic construct
  REGION 1..21: note = Synthetic
ARDSARWFYDSSGYYPSDFDY

SEQ ID NO: 2523 - protein, 108 aa, synthetic construct
  REGION 1..108: note = Synthetic
EIVMTQSPATLSVSPGERATLSCRASQSVSSNLAWYQQRPGQAPRLLIYGASTRATGIPARFSGSGSGTEFTLTISSLQSEDFAVYYCQHYNNWPPWTFGQGTKVEIK

SEQ ID NO: 2524 - protein, 10 aa, synthetic construct
  REGION 1..10: note = Synthetic
QHYNNWPPWT

SEQ ID NO: 2525 - protein, 126 aa, synthetic construct; identical to SEQ ID NO: 443
  REGION 1..126: note = Synthetic

SEQ ID NO: 2526 - protein, 19 aa, synthetic construct
  REGION 1..19: note = Synthetic
AKGPGGSGVYYFYFYYMDA

SEQ ID NO: 2527 - protein, 107 aa, synthetic construct; identical to SEQ ID NO: 444
  REGION 1..107: note = Synthetic

SEQ ID NO: 2528 - protein, 8 aa, synthetic construct
  REGION 1..8: note = Synthetic
QQYGSLYT

SEQ ID NO: 2529 - protein, 120 aa, synthetic construct
  REGION 1..120: note = Synthetic
EVQLVQSGAEVKKPGESLRISCKGSGYSFTSYWIIWVRQMPGKGLEWMGMIDPSDFYTNYSPSFQGHVTISADKSISTAYLQWSSLKASDTAMYYCARHFLGPPGTFDYWGQGTLVTVSS

SEQ ID NO: 2530 - protein, 13 aa, synthetic construct
  REGION 1..13: note = Synthetic
ARHFLGPPGTFDY

SEQ ID NO: 2531 - protein, 108 aa, synthetic construct
  REGION 1..108: note = Synthetic
DIQMTQSPSSLSASVGDRVTITCQASQDITNYLNWYQHKPGKAPKLLIYDVSNLETGVPSRFSGSGSGTDFTFTISSLQPEDIATYYCQQYENLLPITFGQGTRLEIK

SEQ ID NO: 2532 - protein, 10 aa, synthetic construct
  REGION 1..10: note = Synthetic
QQYENLLPIT

SEQ ID NO: 2533 - protein, 127 aa, synthetic construct
  REGION 1..127: note = Synthetic
EVQLVESGGGLVKPGGSLRLSCAASGFTFSNAWMSWVRQAPGKGLEWVGRIKSKTDGGTTDYAAPVKGRFTISRDDSKNTLYLQMNSLKTEDTAVYYCTTDFSYYDYVWGSYPWGYWGQGTLVTVSS

SEQ ID NO: 2534 - protein, 18 aa, synthetic construct
  REGION 1..18: note = Synthetic
TTDFSYYDYVWGSYPWGY

SEQ ID NO: 2535 - protein, 106 aa, synthetic construct
  REGION 1..106: note = Synthetic
DIQMTQSPSSLSASVGDRVTITCQASQDISNYLNWYQQKPGKAPKLLIYDASNLETGVPSRFSGSGSGTDFTFTISSLQPEDIATYYCQQYDNLPCFGGGTKVEIK

SEQ ID NO: 2536 - protein, 8 aa, synthetic construct
  REGION 1..8: note = Synthetic
QQYDNLPC

SEQ ID NO: 2537 - protein, 129 aa, synthetic construct
  REGION 1..129: note = Synthetic
EVQLLESGGGLVQPGGSLRLSCAASGFTFSSYAMSWVRQAPGKGLEWVSAISDSGGSTYYADSVKGRFTISRDNSKNTLYLQMNSLRAEDTAVYYCAKCIRYYYASGSYYKPMGWFDPWGQGTLVTVSS

SEQ ID NO: 2538 - protein, 22 aa, synthetic construct
  REGION 1..22: note = Synthetic
AKCIRYYYASGSYYKPMGWFDP

SEQ ID NO: 2539 - protein, 107 aa, synthetic construct
  REGION 1..107: note = Synthetic
DIQMTQSPSSLSASVGDRVTITCQASQDISNYLNWYQQKPGKAPKLLIYDASNLETGVPSRFSGSGSGTDFTFTISSLQPEDIATYYCQQYDNLPLTFGGGTKVEIK

SEQ ID NO: 2540 - protein, 9 aa, synthetic construct
  REGION 1..9: note = Synthetic
QQYDNLPLT

SEQ ID NO: 2541 - protein, 122 aa, synthetic construct
  REGION 1..122: note = Synthetic
QVQLVQSGAEVKKPGASVKVSCKVSGYTLTELSMHWVRQAPGKGLEWMGGFDPEDVETIYAQKFQGRVTMTEDTSTDTAHMELSSLRSEDTAVYYCATAGPLPYYYYVMDVWGQGTTVTVSS

SEQ ID NO: 2542 - protein, 15 aa, synthetic construct
  REGION 1..15: note = Synthetic
ATAGPLPYYYYVMDV

SEQ ID NO: 2543 - protein, 109 aa, synthetic construct
  REGION 1..109: note = Synthetic
EIVLTQSPXXLSLSPGERATLSCRASQSVSSSYLAWYQQKPGQAPRLLIYGASSRATGIPDRFSGSGSGTDFTLTISRLEPEDFAVYYCQQYGSSPMYTFGQGTKLEIK

SEQ ID NO: 2544 - protein, 10 aa, synthetic construct
  REGION 1..10: note = Synthetic
QQYGSSPMYT

SEQ ID NO: 2545 - protein, 122 aa, synthetic construct
  REGION 1..122: note = Synthetic
EVQLVESGGGLVQPGGSLRLSCAASGFTFSTYWMNWVRQAPGKGLEWVANIKQDGSEKYYVDSVMGRFTISRDNAKNSLYLQMNSLRAEDTAVYYCARAGLQWELLPYFDFWGQGTLVTVSS

SEQ ID NO: 2546 - protein, 15 aa, synthetic construct
  REGION 1..15: note = Synthetic
ARAGLQWELLPYFDF

SEQ ID NO: 2547 - protein, 107 aa, synthetic construct
  REGION 1..107: note = Synthetic
AIQMTQSPXXLSASVGDRVTITCRASQGIRNDLGWYQQKPGKAPKLLIYAASSLQSGVPSRFSGSGSGTDFTLTISSLQPEDFATYYCLQDYNYPLTFGGGTKVEIK

SEQ ID NO: 2548 - protein, 9 aa, synthetic construct
  REGION 1..9: note = Synthetic
LQDYNYPLT

SEQ ID NO: 2549 - protein, 129 aa, synthetic construct; identical to SEQ ID NO: 487
  REGION 1..129: note = Synthetic

SEQ ID NO: 2550 - protein, 22 aa, synthetic construct
  REGION 1..22: note = Synthetic
ARDGTGEFLEWLLPDALYYFDY

SEQ ID NO: 2551 - protein, 107 aa, synthetic construct; identical to SEQ ID NO: 488
  REGION 1..107: note = Synthetic

SEQ ID NO: 2552 - protein, 9 aa, synthetic construct
  REGION 1..9: note = Synthetic
QQSYSIPPT

SEQ ID NO: 2553 - protein, 128 aa, synthetic construct; identical to SEQ ID NO: 461
  REGION 1..128: note = Synthetic

SEQ ID NO: 2554 - protein, 21 aa, synthetic construct
  REGION 1..21: note = Synthetic
ATGTAVAGTPQAYYYYYGMDV

SEQ ID NO: 2555 - protein, 107 aa, synthetic construct; identical to SEQ ID NO: 462
  REGION 1..107: note = Synthetic

SEQ ID NO: 2556 - protein, 9 aa, synthetic construct
  REGION 1..9: note = Synthetic
QQYYSTPVT

SEQ ID NO: 2557 - protein, 122 aa, synthetic construct
  REGION 1..122: note = Synthetic
EVQLVESGGGLVKPGGSLRLSCAASGLTFSSYNMNWVRQAPGKGLEWVSSISSSSSYIYYADSVKGRFTISRDNAKNSLYLQMNSLRAEDTAVYYCARARFLEWLPGPFDYWGQGTLVTVSS

SEQ ID NO: 2558 - protein, 15 aa, synthetic construct
  REGION 1..15: note = Synthetic
ARARFLEWLPGPFDY

SEQ ID NO: 2559 - protein, 107 aa, synthetic construct
  REGION 1..107: note = Synthetic
DIQMTQSPSSLSASVGDRVTITCRASQGISNSLAWYQQKPGKAPKLLLYAASRLESGVPSRFSGSGSGTDYTLTISSLQPEDFATYYCQQYYSTPLTFGGGTKVEIK

SEQ ID NO: 2560 - protein, 9 aa, synthetic construct
  REGION 1..9: note = Synthetic
QQYYSTPLT

SEQ ID NO: 2561 - protein, 123 aa, synthetic construct
  REGION 1..123: note = Synthetic
QLQLQESGPGLVKPSETLSLTCTVSGGSISSSSYYWGWIRQPPGKGLEWIGNIFYSGSTYYNPSLKNRVAISVDTSKNQFSLKLSSVTAADTAVYYCARHGDTYYYESTLDYWGQGTLVTVSS

SEQ ID NO: 2562 - protein, 15 aa, synthetic construct
  REGION 1..15: note = Synthetic
ARHGDTYYYESTLDY

SEQ ID NO: 2563 - protein, 107 aa, synthetic construct
  REGION 1..107: note = Synthetic
DIQMTQSPSSLSASVGDRVTITCRASQGIRNDLGWYQQKPGKAPKRLIYAASSLQRGVPSRFSGSGSGTEFTLTISSLQPEDFATYYCLQHNSYPLTFGGGTKVEIK

SEQ ID NO: 2564 - protein, 9 aa, synthetic construct
  REGION 1..9: note = Synthetic
LQHNSYPLT

SEQ ID NO: 2565 - protein, 129 aa, synthetic construct; identical to SEQ ID NO: 441
  REGION 1..129: note = Synthetic

SEQ ID NO: 2566 - protein, 22 aa, synthetic construct
  REGION 1..22: note = Synthetic
AKCIRYYYGSGSYYKPTGWFDP

SEQ ID NO: 2567 - protein, 107 aa, synthetic construct; identical to SEQ ID NO: 442
  REGION 1..107: note = Synthetic

SEQ ID NO: 2568 - protein, 9 aa, synthetic construct
  REGION 1..9: note = Synthetic
QQYDNLPLT

SEQ ID NO: 2569 - protein, 120 aa, synthetic construct
  REGION 1..120: note = Synthetic
EVQLLESGGGLVQPGGSLRLSCAASGFTFSTCAMSWVRQAPGKGLEWVSAISGSGGGTYYADSVKGRFAISRDISKNTLYLQMNSLRAEDTAVYYCAKNSRIWNYGFDYWGQGTLVTVSS

SEQ ID NO: 2570 - protein, 13 aa, synthetic construct
  REGION 1..13: note = Synthetic
AKNSRIWNYGFDY

SEQ ID NO: 2571 - protein, 107 aa, synthetic construct
  REGION 1..107: note = Synthetic
DIQMTQSPXTLSASVGDRVTITCRASQGIRNDLGWYQQKPGKAPKRLIYAASSLQSGVPSRFSGSGSGTEFTLTISSLQPEDFATYYCLQHNSYPWTFGQGTKVEIK

SEQ ID NO: 2572 - protein, 9 aa, synthetic construct
  REGION 1..9: note = Synthetic
LQHNSYPWT

SEQ ID NO: 2573 - protein, 128 aa, synthetic construct; identical to SEQ ID NO: 435
  REGION 1..128: note = Synthetic

SEQ ID NO: 2574 - protein, 21 aa, synthetic construct
  REGION 1..21: note = Synthetic
ATGYAVTGTPQNYSYYYGMDV

SEQ ID NO: 2575 - protein, 107 aa, synthetic construct; identical to SEQ ID NO: 436
  REGION 1..107: note = Synthetic

SEQ ID NO: 2576 - protein, 8 aa, synthetic construct
  REGION 1..8: note = Synthetic
QQYGSSHS

SEQ ID NO: 2577 - protein, 123 aa, synthetic construct
  REGION 1..123: note = Synthetic
EVQLLESGGGLVQPGGSLRLSCAASGFTFSSYAMSWVRQAPGKGLEWVSAISVSGGSTYYADSVKGRFTISRDNSKNTLYLQMNSLRAEDTAVYYCAKDKSSGIAGVSYFDYWGQGTLVTVSS

SEQ ID NO: 2578 - protein, 16 aa, synthetic construct
  REGION 1..16: note = Synthetic
AKDKSSGIAGVSYFDY

SEQ ID NO: 2579 - protein, 107 aa, synthetic construct
  REGION 1..107: note = Synthetic
DIQMTQSPXTLSASVGDRVTITCRASQSISSWLAWYQQKPGKAPKLLIYKASSLESGVPSRFSGSGSGTEFTLTISSLQPDDFATYYCQQYNSYSPTFGQGTKLEIK

SEQ ID NO: 2580 - protein, 9 aa, synthetic construct
  REGION 1..9: note = Synthetic
QQYNSYSPT

SEQ ID NO: 2581 - protein, 123 aa, synthetic construct
  REGION 1..123: note = Synthetic
QVQLVQSGAEVKKPGASVKVSCKASGYTFTRYYMNWVRQAPGQGLEWMGIINPSGGSTSYAQKFKGRVTMTRDTSTSTVYMELSSLRSEDTAVYYCARELDIVVVPAAPFDYWGQGTLVTVSS

SEQ ID NO: 2582 - protein, 16 aa, synthetic construct
  REGION 1..16: note = Synthetic
ARELDIVVVPAAPFDY

SEQ ID NO: 2583 - protein, 109 aa, synthetic construct
  REGION 1..109: note = Synthetic
EIVLTQSPXXLSLSPGERATLSCRASQSVSIYLAWYQQKPGQAPRLLIYDASNRATGIPARFSGSGSGTDFTLTISSLEPEDFAVYYCQQRSNWPPSITFGQGTRLEIK

SEQ ID NO: 2584 - protein, 11 aa, synthetic construct
  REGION 1..11: note = Synthetic
QQRSNWPPSIT

SEQ ID NO: 2585 - protein, 120 aa, synthetic construct
  REGION 1..120: note = Synthetic
QVQLQESGPGLVKPSETLSLTCTVSGGSISSYYWSWIRQPPGKGLDWIGYIYYSGSTNYNPSLKSRVTISVDTSKNQFSLKLSSVTAADTAVYYCARENNDILTGYIDYWGQGTLVTVSS

SEQ ID NO: 2586 - protein, 14 aa, synthetic construct
  REGION 1..14: note = Synthetic
ARENNDILTGYIDY

SEQ ID NO: 2587 - protein, 113 aa, synthetic construct
  REGION 1..113: note = Synthetic
DIVMTQSPXTLAVSLGERATINCKSSQSVLYSSNNKNYLAWYQQKPGQPPKLLIYWASTRESGVPDRFSGSGSGTDFTLTISSLQAEDVAVYYCQQYYNAPRTFGQGTKVEIK

SEQ ID NO: 2588 - protein, 9 aa, synthetic construct
  REGION 1..9: note = Synthetic
QQYYNAPRT

SEQ ID NO: 2589 - protein, 122 aa, synthetic construct
  REGION 1..122: note = Synthetic
QVQLVQSGAEVKKPGASVKVSCKVSGYTLIELSMHWVRQAPGKGLEWMGGFDPEDVKTIYAQKFQGRVTMTEDTSTDTAYMELSSLRSEDTAVYYCATTGPLPYYYYGMDVWGQGTTVTVSS

SEQ ID NO: 2590 - protein, 15 aa, synthetic construct
  REGION 1..15: note = Synthetic
ATTGPLPYYYYGMDV

SEQ ID NO: 2591 - protein, 109 aa, synthetic construct; identical to SEQ ID NO: 2431
  REGION 1..109: note = Synthetic

SEQ ID NO: 2592 - protein, 10 aa, synthetic construct
  REGION 1..10: note = Synthetic
QQYGSSPMYT

SEQ ID NO: 2593 - protein, 128 aa, synthetic construct; identical to SEQ ID NO: 437
  REGION 1..128: note = Synthetic

SEQ ID NO: 2594 - protein, 21 aa, synthetic construct
  REGION 1..21: note = Synthetic
ARDSARWFHDSSGYYPSDFDY

SEQ ID NO: 2595 - protein, 108 aa, synthetic construct; identical to SEQ ID NO: 438
  REGION 1..108: note = Synthetic

SEQ ID NO: 2596 - protein, 10 aa, synthetic construct
  REGION 1..10: note = Synthetic
QHYYNWPPWT

SEQ ID NO: 2597 - protein, 129 aa, synthetic construct; identical to SEQ ID NO: 489
  REGION 1..129: note = Synthetic

SEQ ID NO: 2598 - protein, 22 aa, synthetic construct
  REGION 1..22: note = Synthetic
ARDGTGGFLEWLLPDALFYFDY

SEQ ID NO: 2599 - protein, 107 aa, synthetic construct; identical to SEQ ID NO: 490
  REGION 1..107: note = Synthetic

SEQ ID NO: 2600 - protein, 9 aa, synthetic construct
  REGION 1..9: note = Synthetic
QQSYSTPPT

SEQ ID NO: 2601 - protein, 123 aa, synthetic construct
  REGION 1..123: note = Synthetic
QLQLQESGPGLVKPSETLSLTCTVSGGSISSSNFYWGWIRQPPGKGLEWIGNIYYSGSTYYNPSLKSRVTISVDTSKNQFSLKLTSVTAADTAVYYCARHGDTYYYESTLDYWGQGTLVTVSS

SEQ ID NO: 2602 - protein, 15 aa, synthetic construct
  REGION 1..15: note = Synthetic
ARHGDTYYYESTLDY

SEQ ID NO: 2603 - protein, 107 aa, synthetic construct; identical to SEQ ID NO: 326
  REGION 1..107: note = Synthetic

SEQ ID NO: 2604 - protein, 9 aa, synthetic construct
  REGION 1..9: note = Synthetic
LQHNSYPLT

SEQ ID NO: 2605 - protein, 122 aa, synthetic construct; identical to SEQ ID NO: 421
  REGION 1..122: note = Synthetic

SEQ ID NO: 2606 - protein, 15 aa, synthetic construct
  REGION 1..15: note = Synthetic
ATAGPLPYYYYCMDV

SEQ ID NO: 2607 - protein, 109 aa, synthetic construct; identical to SEQ ID NO: 422
  REGION 1..109: note = Synthetic

SEQ ID NO: 2608 - protein, 10 aa, synthetic construct
  REGION 1..10: note = Synthetic
QQYGSSPMYT

SEQ ID NO: 2609 - protein, 122 aa, synthetic construct
  REGION 1..122: note = Synthetic
QVQLVQSGVEVKKPGASVKVSCKASGYTFTSYGISWVRQAPGQGLEWMGWISPYNANTHYAQKLQGRVTMTTDTSTSTAYMELRSLRSDDTAVYYCARDHRTVTTFGTFDYWGQGILVTVSS

SEQ ID NO: 2610 - protein, 15 aa, synthetic construct
  REGION 1..15: note = Synthetic
ARDHRTVTTFGTFDY

SEQ ID NO: 2611 - protein, 107 aa, synthetic construct
  REGION 1..107: note = Synthetic
DIQMTQSPXXLSASVGDRVIITCRASQSINTYLNWYQQKPGKAPKLLIYAASSLQSGVPPRFSGSGSGTDFTLTISSLQPEDFATYYCQQSYFTPFTFGPGTKVDIK

SEQ ID NO: 2612 - protein, 9 aa, synthetic construct
  REGION 1..9: note = Synthetic
QQSYFTPFT

SEQ ID NO: 2613 - protein, 127 aa, synthetic construct
  REGION 1..127: note = Synthetic
EVQLVESGGGLVKPGGSLRLSCAASGFTFSSYNMNWVRQAPGKGLEWVSSISSSSSYIYYADSMKGRFTISRDNAKNSLYLQMNSLRAEDTAVYYCARDRTYYDFWSGYYVDAYDIWGQGTMVTVSS

SEQ ID NO: 2614 - protein, 20 aa, synthetic construct
  REGION 1..20: note = Synthetic
ARDRTYYDFWSGYYVDAYDI

SEQ ID NO: 2615 - protein, 108 aa, synthetic construct
  REGION 1..108: note = Synthetic
EIVMTQSPXXLSVSPGERATLSCRASQSVSSNLAWYQQKPGQAPRLLIYGASTRATGIPARFSGSGSGTEFTLTISSLQSEDFAVYYCQQYYNWPPWTFGQGTKVEIK

SEQ ID NO: 2616 - protein, 10 aa, synthetic construct
  REGION 1..10: note = Synthetic
QQYYNWPPWT

SEQ ID NO: 2617 - protein, 121 aa, synthetic construct; identical to SEQ ID NO: 429
  REGION 1..121: note = Synthetic

SEQ ID NO: 2618 - protein, 15 aa, synthetic construct
  REGION 1..15: note = Synthetic
ARGHPMIVVVKGFDP

SEQ ID NO: 2619 - protein, 107 aa, synthetic construct; identical to SEQ ID NO: 430
  REGION 1..107: note = Synthetic

SEQ ID NO: 2620 - protein, 9 aa, synthetic construct
  REGION 1..9: note = Synthetic
LQHNSYPRT

SEQ ID NO: 2621 - protein, 123 aa, synthetic construct
  REGION 1..123: note = Synthetic
EVQLLESGGGLVQPGGSLRLSCAASGFTFSSYAMSWVRQAPGKGLEWVSGLSVSGGSTYYADSVKGRFTISRDNSKNTLYLQMNSLRAEDTAVYYCAKDRASGIVGATFFDYWGQGTLVTVSS

SEQ ID NO: 2622 - protein, 16 aa, synthetic construct
  REGION 1..16: note = Synthetic
AKDRASGIVGATFFDY

SEQ ID NO: 2623 - protein, 108 aa, synthetic construct
  REGION 1..108: note = Synthetic
EIVMTQSPATLSVSPGERATLSCRASQSVSSNLAWYQQKPGQAPRLLIYGASTRATGIPARFSGSGSGTEFTLTISSLQSEDFAVYYCQQFNNWPSLTFGGGTKVEIK

SEQ ID NO: 2624 - protein, 10 aa, synthetic construct
  REGION 1..10: note = Synthetic
QQFNNWPSLT

SEQ ID NO: 2625 - protein, 122 aa, synthetic construct
  REGION 1..122: note = Synthetic
QVQLVQSGAEVKKPGASVKVSCKVSGYTLTELSMHWVRQAPGKGLEWMGGFDPEDGETIYAQKFQGRVTMPEDTSTDTAYMELSSLRSEDTAVYYCATAGPLPYYYYAMDVWGQGTTVTVSS

SEQ ID NO: 2626 - protein, 15 aa, synthetic construct
  REGION 1..15: note = Synthetic
ATAGPLPYYYYAMDV

SEQ ID NO: 2627 - protein, 109 aa, synthetic construct
  REGION 1..109: note = Synthetic
EIVLTQSPGTLSLSPGERATLSCRASQSVSSSYLAWFQQKPGQAPRLLIYGASSRATGIPDRFSGSGSGTDFTLTIGRLEPEDFAVYYCQQYGSSPMYTFGQGTKLEIK

SEQ ID NO: 2628 - protein, 10 aa, synthetic construct
  REGION 1..10: note = Synthetic
QQYGSSPMYT

SEQ ID NO: 2629 - protein, 123 aa, synthetic construct; identical to SEQ ID NO: 545
  REGION 1..123: note = Synthetic

SEQ ID NO: 2630 - protein, 16 aa, synthetic construct
  REGION 1..16: note = Synthetic
ARSNGGLEWVSDAFDI

SEQ ID NO: 2631 - protein, 107 aa, synthetic construct
  REGION 1..107: note = Synthetic
SYVLTQPPSVSVSPGQTARITCSGDALANQYVYWYQQKPGQAPVLVIYKDNERPSGIPERYSGSSSGTTVTLTISGVQAEDEADYYCQSADSNSNWVFGGGTKLTVL

SEQ ID NO: 2632 - protein, 10 aa, synthetic construct
  REGION 1..10: note = Synthetic
QSADSNSNWV

SEQ ID NO: 2633 - protein, 123 aa, synthetic construct
  REGION 1..123: note = Synthetic
EVQLLESGGGWVQPGGSLRLSCTTSGFTFTTSAMNWVRQAPGKGLEWVSTISVSGSSTYYTDSVKGRFTISRDNSKNTLYLQLNSLRAEDTAVYYCAKGVNWGVDGTTYFDYWGQGTLVTISS

SEQ ID NO: 2634 - protein, 16 aa, synthetic construct
  REGION 1..16: note = Synthetic
AKGVNWGVDGTTYFDY

SEQ ID NO: 2635 - protein, 106 aa, synthetic construct
  REGION 1..106: note = Synthetic
SYELTQPLSVSVALGQTARITCGGNNIANKDVHWYQQKPGQAPVLVIYKDSNRPSGIPERFSGSNSGNTATLTISRAQAGDEADYYCQVWDSNYVVFGGGTKLTVL

SEQ ID NO: 2636 - protein, 9 aa, synthetic construct
  REGION 1..9: note = Synthetic
QVWDSNYVV

SEQ ID NO: 2637 - protein, 117 aa, synthetic construct
  REGION 1..117: note = Synthetic
QVQLVESGGGVVQSGGSLRLSCAASGFSFSNYGMHWVRQAPGKGLQWVAFIRYDGTSKYYADSVRGRFSVSRDNSKNTLYLQMNSLRPEDTAVYYCATFIFIAFDYWGQGTLVPVSS

SEQ ID NO: 2638 - protein, 10 aa, synthetic construct
  REGION 1..10: note = Synthetic
ATFIFIAFDY

SEQ ID NO: 2639 - protein, 110 aa, synthetic construct
  REGION 1..110: note = Synthetic
QFVLTQPHSVSGSPGQSVTISCTGTSSDVGTYHAVSWYQQHPGKAPKLMIFDVTKRPSGVPDRFSGSRSGNTASLTISGLQAEDEAEYYCCSYASSYSYIFGPGTKVTVL

SEQ ID NO: 2640 - protein, 10 aa, synthetic construct
  REGION 1..10: note = Synthetic
CSYASSYSYI

SEQ ID NO: 2641 - protein, 128 aa, synthetic construct
  REGION 1..128: note = Synthetic
QVQLVQSGAEVKKPGASVKVSCKVSGYTLSELSMHWVRQAPGKGLEWMGGFDPEDAKTLYAQKFQDRVTMTEDTFTGTAYMELSGLRSDDTGLYFCAAAFAVIGSPNNYYYYYGIDVWGQGSTVTVSS

SEQ ID NO: 2642 - protein, 21 aa, synthetic construct
  REGION 1..21: note = Synthetic
AAAFAVIGSPNNYYYYYGIDV

SEQ ID NO: 2643 - protein, 110 aa, synthetic construct
  REGION 1..110: note = Synthetic
QFVLTQPPSASGSPGQRVTISCSGSNSNIGNTFIYWYQQLPGTAPKLLIFRNDQRPSGVPDRFSGSKSGTSASLAISGLRSEDEADYYCAAWIDSLSAWVFGGGTMLTVV

SEQ ID NO: 2644 - protein, 11 aa, synthetic construct
  REGION 1..11: note = Synthetic
AAWIDSLSAWV

SEQ ID NO: 2645 - protein, 121 aa, synthetic construct
  REGION 1..121: note = Synthetic
EVQLVESGGGLVQPGGSLRLSCSASAFTFSSYAMHWVRQAPGKGLEYVSAISSNGAATYYTDSVRGRFTISRDNSKNKLFLQMSSLRAEDTAVYYCVKGDYDFWSGFLTYWGQGTLVTVSS

SEQ ID NO: 2646 - protein, 14 aa, synthetic construct
  REGION 1..14: note = Synthetic
VKGDYDFWSGFLTY

SEQ ID NO: 2647 - protein, 109 aa, synthetic construct
  REGION 1..109: note = Synthetic
QFVLTQPPSASGTPGQRVTISCSGSSSNIGSNTVNWYQQFPGTAPKLLIYSNNQRPSGVPDRFSGSKSGTSASLAISGLQSEDEADYYCAAWDDSLNVLFGGGTKLTVL

SEQ ID NO: 2648 - protein, 10 aa, synthetic construct
  REGION 1..10: note = Synthetic
AAWDDSLNVL

SEQ ID NO: 2649 - protein, 125 aa, synthetic construct; identical to SEQ ID NO: 515
  REGION 1..125: note = Synthetic

SEQ ID NO: 2650 - protein, 18 aa, synthetic construct
  REGION 1..18: note = Synthetic
AKDGGTVQVFLWAYYFDY

SEQ ID NO: 2651 - protein, 112 aa, synthetic construct
  REGION 1..112: note = Synthetic
QFVLTQPASVSGSPGQSVTISCTGNSNDVGSYNLVSWYQQHPGKAPKVIIFDVNKRPSGVSARFSGSKSGNTASLTISGLQAEDEADYYCCSYSGATTLHVLFGGGTKLTVL

SEQ ID NO: 2652 - protein, 12 aa, synthetic construct
  REGION 1..12: note = Synthetic
CSYSGATTLHVL

SEQ ID NO: 2653 - protein, 120 aa, synthetic construct
  REGION 1..120: note = Synthetic
QVQLQESGPGLVKPSGTLSLTCAVSGGSISSSHWWSWVRQPPGKGLEWIGEIYHSGSTNYNPALKSRVTMSVDKSKNQFSLKLSSVTAADTAVYYCASRDSGYWNWFDPWGQGTLVTVSS

SEQ ID NO: 2654 - protein, 13 aa, synthetic construct
  REGION 1..13: note = Synthetic
ASRDSGYWNWFDP

SEQ ID NO: 2655 - protein, 110 aa, synthetic construct
  REGION 1..110: note = Synthetic
QFVLTQPASVSGSPGQSITISCTGTSSDVGSYNLVSWYQQHPGKAPKLMIYEGSKWPSGVSNRFSGSKSGNTASLTISGLQAEDEADYHCCSYAGSSTWVFGGGTKLTVL

SEQ ID NO: 2656 - protein, 10 aa, synthetic construct
  REGION 1..10: note = Synthetic
CSYAGSSTWV

SEQ ID NO: 2657 - protein, 124 aa, synthetic construct; identical to SEQ ID NO: 541
  REGION 1..124: note = Synthetic

SEQ ID NO: 2658 - protein, 17 aa, synthetic construct
  REGION 1..17: note = Synthetic
AKDGGVESHYYYYYMDV

SEQ ID NO: 2659 - protein, 112 aa, synthetic construct
  REGION 1..112: note = Synthetic
QFVLTQPASVSGSPGQSITISCTGTSSDVGSYNLVSWYQQHPGKAPKLMIYDVSKRPSGVSNRFSGSKSGNRASLTISGLQAEDEADYYCCSYAGTTTSFYVFGTGTQVTVL

SEQ ID NO: 2660 - protein, 12 aa, synthetic construct
  REGION 1..12: note = Synthetic
CSYAGTTTSFYV

SEQ ID NO: 2661 - protein, 124 aa, synthetic construct; identical to SEQ ID NO: 535
  REGION 1..124: note = Synthetic

SEQ ID NO: 2662 - protein, 17 aa, synthetic construct
  REGION 1..17: note = Synthetic
AKDRGWGVEEAGTYLDH

SEQ ID NO: 2663 - protein, 110 aa, synthetic construct
  REGION 1..110: note = Synthetic
QFVLTQPASVSGSPGQSITISCTGTSSDIGAYXYVSWYQHHPGKAPKVXIYEVSNRPSGVYIWFSGSKYGNTASPTISGLQAEDEANYYCSSYRSDSTVTFGGGTKLTVL

SEQ ID NO: 2664 - protein, 10 aa, synthetic construct
  REGION 1..10: note = Synthetic
SSYRSDSTVT

SEQ ID NO: 2665 - protein, 127 aa, synthetic construct
  REGION 1..127: note = Synthetic
EVQLLESGGGLVQPGGSLRLSCAASGFTFRSFAMSWVRQAPGMGLEWVSDISGSGETTYYADSVKGRFAISRDNFKNTLYLQMNSLRVEDTAVYYCAKDRGVGHDSGSYYYLGLDYWGQGALVTVSS

SEQ ID NO: 2666 - protein, 20 aa, synthetic construct
  REGION 1..20: note = Synthetic
AKDRGVGHDSGSYYYLGLDY

SEQ ID NO: 2667 - protein, 113 aa, synthetic construct
  REGION 1..113: note = Synthetic
QFVLTQPASVSGSPGQSITISCTGTSSDVGGYNYVSWYQRHPGKAPKLMIYEVSNRPSGVSNRFSGSKSGNTASLTISGLQAEDEADYYCSSYTSSRSLGEVVFGGGTKLTVL

SEQ ID NO: 2668 - protein, 13 aa, synthetic construct
  REGION 1..13: note = Synthetic
SSYTSSRSLGEVV

SEQ ID NO: 2669 - protein, 121 aa, synthetic construct
  REGION 1..121: note = Synthetic
QLQLQESGPGLVKPSETLSLTCSVSGGSISRSSYYWGWVRQPPGKGLEWIGRIHNSGSTYYNPSLKSRVTISADTSKNQFSLRVTSVTAADTAVYYCASPFPLRVYGMDVWGQGTTVTVSS

SEQ ID NO: 2670 - protein, 13 aa, synthetic construct
  REGION 1..13: note = Synthetic
ASPFPLRVYGMDV

SEQ ID NO: 2671 - protein, 110 aa, synthetic construct
  REGION 1..110: note = Synthetic
QFVLTQPASVSGSPGQSITISCTGTTSDVGRYEYVSWYQQHPGKAPKLMIYDVTNRPSGVSNRFSGSKSGNTASLTISGLQAEDEADYYCSSYTTSSTEVFGTGTKVTVL

SEQ ID NO: 2672 - protein, 10 aa, synthetic construct
  REGION 1..10: note = Synthetic
SSYTTSSTEV

SEQ ID NO: 2673 - protein, 120 aa, synthetic construct
  REGION 1..120: note = Synthetic
EVQLLESGGGLVQPGGSLRLSCAASGFTFSSYGMSWVRQTPGKGLEWVSSISGSGGSTDYADSVKGRCTISRDNSKNTLYLQMNTLRAEDTAIYYCAKNIWTLTPGVHFWGRGTLVTVSS

SEQ ID NO: 2674 - protein, 13 aa, synthetic construct
  REGION 1..13: note = Synthetic
AKNIWTLTPGVHF

SEQ ID NO: 2675 - protein, 109 aa, synthetic construct
  REGION 1..109: note = Synthetic
QFVLTQEPSLTVSPGGTVTLTCASSAGAVTSDDYPNWFQQKPGQAPRALIYSTTNKHTWTPARFSGSLLGDKAALTLSGVQPEDEADYYCLLYIGGVQGVFGGGTRLTV

SEQ ID NO: 2676 - protein, 10 aa, synthetic construct
  REGION 1..10: note = Synthetic
LLYIGGVQGV

SEQ ID NO: 2677 - protein, 123 aa, synthetic construct; identical to SEQ ID NO: 523
  REGION 1..123: note = Synthetic

SEQ ID NO: 2678 - protein, 17 aa, synthetic construct
  REGION 1..17: note = Synthetic
AGGIDATPVGYYYGMDV

SEQ ID NO: 2679 - protein, 107 aa, synthetic construct
  REGION 1..107: note = Synthetic
SYVLTQPPSVSVSPGQTASITCSGDKLGDQYAFWYQQKPGQSPVLVIYQDTKRPSGIPERFSGSNSGNTATLTISGTQAMDEADYYCQAWDSSTYVVFGGGTKLTVL

SEQ ID NO: 2680 - protein, 10 aa, synthetic construct
  REGION 1..10: note = Synthetic
QAWDSSTYVV

SEQ ID NO: 2681 - protein, 127 aa, synthetic construct; identical to SEQ ID NO: 509
  REGION 1..127: note = Synthetic

SEQ ID NO: 2682 - protein, 20 aa, synthetic construct
  REGION 1..20: note = Synthetic
ARGVRLVPGDFWDNYWYFDL

SEQ ID NO: 2683 - protein, 110 aa, synthetic construct
  REGION 1..110: note = Synthetic
QFVLTQPPSASGSPGLSVTIACTGTSSDVGGYKYVSWYQQHPGKAPKLLIYEVTKRPSGVPDRFSGSKSGITASLTVSGLQAEDEADYFCSSYAGSNNLVFGGGTKLTVL

SEQ ID NO: 2684 - protein, 10 aa, synthetic construct
  REGION 1..10: note = Synthetic
SSYAGSNNLV

SEQ ID NO: 2685 - protein, 125 aa, synthetic construct
  REGION 1..125: note = Synthetic
EVQLVQSGAEVKKPGESLRISCKASGYSFTHFWISWVRQTPAKGLEWMGRIDPSDSSTTCSPSFQGHVTISIDKSLNTAFLQWSSLKAWDTAMYFCAREPRITVLGVLDHWFDPWGQGTLVTVSS

SEQ ID NO: 2686 - protein, 18 aa, synthetic construct
  REGION 1..18: note = Synthetic
AREPRITVLGVLDHWFDP

SEQ ID NO: 2687 - protein, 110 aa, synthetic construct; identical to SEQ ID NO: 514
  REGION 1..110: note = Synthetic

SEQ ID NO: 2688 - protein, 11 aa, synthetic construct
  REGION 1..11: note = Synthetic
AAWDDSLSAWV

SEQ ID NO: 2689 - protein, 126 aa, synthetic construct
  REGION 1..126: note = Synthetic
EVQLLESGGGLVQPGGSLRLSCAASGFTFSTYAMSWVRQAPGKGLEWVSAIDGSGGSKYHADSVKGRFTISRDNSKNTLYLQMNNLRAEDTAVYYCAKHIWGSSNSFNYYYYMDVWGTGTTITVSS

SEQ ID NO: 2690 - protein, 19 aa, synthetic construct
  REGION 1..19: note = Synthetic
AKHIWGSSNSFNYYYYMDV

SEQ ID NO: 2691 - protein, 111 aa, synthetic construct
  REGION 1..111: note = Synthetic
QFVLTQPASVSGSPGQSITISCTGTTSDVGNYNLVSWYQHHPGKAPKLMIYEASKRPSGVSNRFSGSKAGNTASLTISGLQAEDEADYYCCSYAGTNTLVVFGGGTKLTVL

SEQ ID NO: 2692 - protein, 11 aa, synthetic construct
  REGION 1..11: note = Synthetic
CSYAGTNTLVV

SEQ ID NO: 2693 - protein, 124 aa, synthetic construct
  REGION 1..124: note = Synthetic
QVQLVESGGGVVQPGRSLRLSCSASGFTFSNFGMHWVRQAPGKGLEWVAFIWHDGSNSYYADSVKGRFIISRDNSKNTVYLQINSLRADDTAMYYCARGREGEGGFFDWFCDYWGQGTLVTVSS

SEQ ID NO: 2694 - protein, 17 aa, synthetic construct
  REGION 1..17: note = Synthetic
ARGREGEGGFFDWFCDY

SEQ ID NO: 2695 - protein, 108 aa, synthetic construct
  REGION 1..108: note = Synthetic
SYVLTQPHSVSVATAQMARITCGGNNIGSKAVHWYQQKPGQDPVLVIYSDSNRPSGIPERFSGSNPGNTATLTISRIEAGDEAGYYCQVWDSSSDHWVFGGGTKLTVL

SEQ ID NO: 2696 - protein, 11 aa, synthetic construct
  REGION 1..11: note = Synthetic
QVWDSSSDHWV

SEQ ID NO: 2697 - protein, 125 aa, synthetic construct
  REGION 1..125: note = Synthetic
EVQLVESGGGLIQPGGSLRLSCAASGFTVSSNYMSWVRQAPGKGLEWVSVIYTGGSTYYADSVKGRFTISRDNSNNSLYLQMNSLRAEDTAVYYCARGPYYDFRSGYSPGWFDPWGQGTLVTVSS

SEQ ID NO: 2698 - protein, 19 aa, synthetic construct
  REGION 1..19: note = Synthetic
ARGPYYDFRSGYSPGWFDP

SEQ ID NO: 2699 - protein, 112 aa, synthetic construct
  REGION 1..112: note = Synthetic
QSALTQPASVSGSPGQSITISCIGTSSDIGSYDLVSWYQHRPGKAPKLMIYDVNKGTSGVSTRFSGSKSGNTASLTISGLQAEDEADYYCCSYAGSSTSYVVFGGGTKLTVL

SEQ ID NO: 2700 - protein, 12 aa, synthetic construct
  REGION 1..12: note = Synthetic
CSYAGSSTSYVV

SEQ ID NO: 2701 - protein, 125 aa, synthetic construct
  REGION 1..125: note = Synthetic
EVQLLESGGGLVQPGGSLRLSCAASGFTFKNYAMTWVRQAPGKGLEWVSAISDNGGSIYYADSVKGRFTVSRDNSKNTLYLQMNRLRADDTAVYYCAKDGGTVQVFLWAYYFDYWGQGALVTVSS

SEQ ID NO: 2702 - protein, 18 aa, synthetic construct
  REGION 1..18: note = Synthetic
AKDGGTVQVFLWAYYFDY

SEQ ID NO: 2703 - protein, 112 aa, synthetic construct
  REGION 1..112: note = Synthetic
QSALTQPASVSGSPGQSVTISCTGNSDDVGSYNLVSWYQQHPGKAPKVIIFDVNKRPSGVSARFSGSKSGNTASLTISGLQAEDEADYYCCSYSGATTLHVLFGGGTKLTVL

SEQ ID NO: 2704 - protein, 12 aa, synthetic construct
  REGION 1..12: note = Synthetic
CSYSGATTLHVL

SEQ ID NO: 2705 - protein, 123 aa, synthetic construct
  REGION 1..123: note = Synthetic
QLQLQESGPGLVKPSETLSLTCNVSNGSISSNSFYWGWIRQPPGKGLEWIGNIFYSGITYSNPSLMSRVTIFVDTSKNQFSLRLNSVTAADTAVYYCARQPLLWSRDEAFDLWGQGTMVTVSS

SEQ ID NO: 2706 - protein, 15 aa, synthetic construct
  REGION 1..15: note = Synthetic
ARQPLLWSRDEAFDL

SEQ ID NO: 2707 - protein, 109 aa, synthetic construct
  REGION 1..109: note = Synthetic
QFVLTQPPSVSAAAGQKVTISCSGSTSNIGKKYVSWFQQLPGTAPKLLIYDNNERPSEIPDRFSGSKSGTTATLDITGLQTGDEADYYCGTWDSSLSAVIFGGGTKLTV

SEQ ID NO: 2708 - protein, 11 aa, synthetic construct
  REGION 1..11: note = Synthetic
GTWDSSLSAVI

SEQ ID NO: 2709 - protein, 124 aa, synthetic construct; identical to SEQ ID NO: 539
  REGION 1..124: note = Synthetic

SEQ ID NO: 2710 - protein, 17 aa, synthetic construct
  REGION 1..17: note = Synthetic
AKDGSMATHYYHYYMDV

SEQ ID NO: 2711 - protein, 112 aa, synthetic construct
  REGION 1..112: note = Synthetic
QXVLTQPASVSGSPGQSITISCTGTSSDVGSFNLVSWYQQHPGKAPKLIIYEGNKRPSGISSRFSGSKSGNTASLTISGLQAEDEADYYCSSYAGITTFYVVFGGGTKLTVL

SEQ ID NO: 2712 - protein, 12 aa, synthetic construct
  REGION 1..12: note = Synthetic
SSYAGITTFYVV

SEQ ID NO: 2713 - protein, 127 aa, synthetic construct
  REGION 1..127: note = Synthetic
EVQLVESGGGLVKPGGSLRLSCAASRFTFSNYTMNWVRQAPGKGLEWVSSISSSSSFIYYADSMKGRFTISRDNAKNSLFLQMNSLRAEDTAVYYCAREGYSGSWHPWYSYYYMDVWGIGTTVTVSS

SEQ ID NO: 2714 - protein, 20 aa, synthetic construct
  REGION 1..20: note = Synthetic
AREGYSGSWHPWYSYYYMDV

SEQ ID NO: 2715 - protein, 111 aa, synthetic construct
  REGION 1..111: note = Synthetic
QSALTQPASVSGSPGQSITISCTGTSSDVGSYNLVSWYQHHPGKAPKLMIYEVNKRPSGVSNRFSGSKSGNTASLTISGIQAEDEADYYCCSYAGSSTHVVFGGGTKLTVL

SEQ ID NO: 2716 - protein, 11 aa, synthetic construct
  REGION 1..11: note = Synthetic
CSYAGSSTHVV

SEQ ID NO: 2717 - protein, 127 aa, synthetic construct
  REGION 1..127: note = Synthetic
QVQLQESGPGLVKPSETLSLTCSVSGGAMSSYYWTWTRQPPGKGLEYIGYIYYRGNTNYTNYSPSLKSRVTISVDTSKNQFSLKLRSVTAADTAVYYCARGESEGTSEPYYYGMDVWGQGTTVTVSS

SEQ ID NO: 2718 - protein, 18 aa, synthetic construct
  REGION 1..18: note = Synthetic
ARGESEGTSEPYYYGMDV

SEQ ID NO: 2719 - protein, 105 aa, synthetic construct
  REGION 1..105: note = Synthetic
SYVLTQPPSVSVSPGQTASITCSGDSLGDKYVCWYQQRPGQSPVLVIYQDTKRPSGIPERFSGSNSGNTATLTISGTQAMDEADYYCQAWATSTVFGGGTKLTVL

SEQ ID NO: 2720 - protein, 8 aa, synthetic construct
  REGION 1..8: note = Synthetic
QAWATSTV

SEQ ID NO: 2721 - protein, 124 aa, synthetic construct; identical to SEQ ID NO: 537
  REGION 1..124: note = Synthetic

SEQ ID NO: 2722 - protein, 17 aa, synthetic construct
  REGION 1..17: note = Synthetic
AKDPSGSHIYYHYYMDV

SEQ ID NO: 2723 - protein, 111 aa, synthetic construct; identical to SEQ ID NO: 538
  REGION 1..111: note = Synthetic

SEQ ID NO: 2724 - protein, 12 aa, synthetic construct
  REGION 1..12: note = Synthetic
CSYAGSSNSYVI

SEQ ID NO: 2725 - protein, 129 aa, synthetic construct; identical to SEQ ID NO: 517
  REGION 1..129: note = Synthetic

SEQ ID NO: 2726 - protein, 21 aa, synthetic construct
  REGION 1..21: note = Synthetic
AREPHRLYYYDNSDYANAFDI

SEQ ID NO: 2727 - protein, 110 aa, synthetic construct
  REGION 1..110: note = Synthetic
QFVXTQPASVSGSPGQSITISCTGTSSDVGSYNLVSWYQQHPGKAPKLLIYEVSKRPSGVSNRFSGSKSGNTASLTISGLQAEDEADYYCCSYAGSRIWVFGGGTKLTVL

SEQ ID NO: 2728 - protein, 10 aa, synthetic construct
  REGION 1..10: note = Synthetic
CSYAGSRIWV

SEQ ID NO: 2729 - protein, 124 aa, synthetic construct; identical to SEQ ID NO: 501
  REGION 1..124: note = Synthetic

SEQ ID NO: 2730 - protein, 21 aa, synthetic construct
  REGION 1..21: note = Synthetic
AAAFAVIGSPNNYYYYYGIDV

SEQ ID NO: 2731 - protein, 110 aa, synthetic construct; identical to SEQ ID NO: 502
  REGION 1..110: note = Synthetic

SEQ ID NO: 2732 - protein, 11 aa, synthetic construct
  REGION 1..11: note = Synthetic
AAWIDSLSAWV

SEQ ID NO: 2733 - protein, 127 aa, synthetic construct
  REGION 1..127: note = Synthetic
EVQLLESGGGLIQPGGSLRLSCAASGFTFRTFAMSWVRQAPGKGLEWVSDISNIGATTFYAKSVKGRFAISRDNSKNTLYLQMNSLRVDDTAVYYCAKDRGIGNDSGSYYYLGLDHWGQGALVTVSS

SEQ ID NO: 2734 - protein, 20 aa, synthetic construct
  REGION 1..20: note = Synthetic
AKDRGIGNDSGSYYYLGLDH

SEQ ID NO: 2735 - protein, 107 aa, synthetic construct
  REGION 1..107: note = Synthetic
SYVLTQPPSVSVSPGQTASITCSGEKLGSKYASWYQQRPGQSPVLVIYEDNKRPSGIPERFSGFISGHTATLTISGTQAMDEADYYCLAWDSSAAYVFGPGTKVTVL

SEQ ID NO: 2736 - protein, 10 aa, synthetic construct
  REGION 1..10: note = Synthetic
LAWDSSAAYV

SEQ ID NO: 2737 - protein, 127 aa, synthetic construct
  REGION 1..127: note = Synthetic
EVQLVESGGGLVKPGGSLRLSCAASGFTFSNYTMNWVRQAPGKGLEWVSSLSSSGNFIYYADSLKGRFTISRDNAKNSLYLQMNSLRAEDTAVYYCAREGYSGSWHPWYSYYYMDVWGKGTTVTVSS

SEQ ID NO: 2738 - protein, 20 aa, synthetic construct
  REGION 1..20: note = Synthetic
AREGYSGSWHPWYSYYYMDV

SEQ ID NO: 2739 - protein, 112 aa, synthetic construct
  REGION 1..112: note = Synthetic
QSALTQPASVSGSPGQSITFSCTGTSSDVGSYSLVSWYQHHPGKAPKLLIYEVTKRPSGVSNRFSGSKSANTASLTISGLQAEDEADYYCCSYAGSSSRYVVFGGGTTLTVL

SEQ ID NO: 2740 - protein, 12 aa, synthetic construct
  REGION 1..12: note = Synthetic
CSYAGSSSRYVV

SEQ ID NO: 2741 - protein, 121 aa, synthetic construct
  REGION 1..121: note = Synthetic
QVQLQESGPGLVKPSQTLSLTCTVSGASISSGGYYWSWVRQYPGKGLEWIGYIYSSGTTYYDPSLESRSSLSLDTSKNQFSLKLSSVTAADTAVYYCARVVSRQHWYFDLWGRGTLVTVSS

SEQ ID NO: 2742 - protein, 13 aa, synthetic construct
  REGION 1..13: note = Synthetic
ARVVSRQHWYFDL

SEQ ID NO: 2743 - protein, 108 aa, synthetic construct
  REGION 1..108: note = Synthetic
QSALTQPRSVSGSPGQSVTISCTGTRSDVGGYNYVSWYQQHPGTGPKLIIYDVTRRPSGVPDRFSGSRSGKTASLTISGLQAEDEADYYCCSYTDTWVFGGGTKLTVL

SEQ ID NO: 2744 - protein, 8 aa, synthetic construct
  REGION 1..8: note = Synthetic
CSYTDTWV

SEQ ID NO: 2745 - protein, 123 aa, synthetic construct
  REGION 1..123: note = Synthetic
EVQLLESGGGLVQPGGSLRLSCAASGFTFGIRAMNWVRQAPGKGLEWVSGISGSGGSTYYADSVKGRFTISRDNSKNILYLQMNSLRAEDSAIYYCTKDVIFGIEINNYFDFWGQGTLVTVSS

SEQ ID NO: 2746 - protein, 16 aa, synthetic construct
  REGION 1..16: note = Synthetic
TKDVIFGIEINNYFDF

SEQ ID NO: 2747 - protein, 108 aa, synthetic construct
  REGION 1..108: note = Synthetic
EIVLTQSPGTLSLSPGERATLSCRASQSIPTNHIAWYQQKPGQPPRLFLYGASSRATGIPERFSGSGSGTDFTLIITRLDPEDFAVYYCQQYDTSPLTFGGGTKVEIK

SEQ ID NO: 2748 - protein, 9 aa, synthetic construct
  REGION 1..9: note = Synthetic
QQYDTSPLT

SEQ ID NO: 2749 - protein, 121 aa, synthetic construct
  REGION 1..121: note = Synthetic
QVQLQQWGAGLLKPSETLSLTCAVSGGSFSGYYWTWIRQTPGKGLEWIGEIIHNGDTKYNPSLKSRVTISLDTSKNQFSLNLSSVTAADTAVYFCARGHPLVVVVKGFDPWGQGTLVTVSS

SEQ ID NO: 2750 - protein, 15 aa, synthetic construct
  REGION 1..15: note = Synthetic
ARGHPLVVVVKGFDP

SEQ ID NO: 2751 - protein, 107 aa, synthetic construct
  REGION 1..107: note = Synthetic
DIQMTQSPSSLSASVGDRVTITCRASQGIRNDLGWYQQKPGKAPKSLIYAASSLESGVPSRFSGSGSGTEFTLTISSLQPEDFATYYCLQHNSYPRTFGQGTKLEIK

SEQ ID NO: 2752 - protein, 9 aa, synthetic construct
  REGION 1..9: note = Synthetic
LQHNSYPRT

SEQ ID NO: 2753 - protein, 128 aa, synthetic construct
  REGION 1..128: note = Synthetic
EVQLVESGGGLVKPGGSLRLSCAASGFTFSTYNMNWVRQAPGKGLEWVSSISSRGNYIYYVDSVKGRFTISRDDAKNSLSLQMSSLRAEDTAVYYCARGLRSSESFLSDYYYYGMDVWGQGTTVTVSS

SEQ ID NO: 2754 - protein, 21 aa, synthetic construct
  REGION 1..21: note = Synthetic
ARGLRSSESFLSDYYYYGMDV

SEQ ID NO: 2755 - protein, 108 aa, synthetic construct
  REGION 1..108: note = Synthetic
EIVMTQSPATLYVSPGDRATLSCRASQSVGDNVAWYQQKPGQAPRLLIYGASTRATGVPARFSGRGSGTEFTLTITSLQSEDFAVYYCQQCYNWPPWTFGQGTKVQIK

SEQ ID NO: 2756 - protein, 10 aa, synthetic construct
  REGION 1..10: note = Synthetic
QQCYNWPPWT

SEQ ID NO: 2757 - protein, 127 aa, synthetic construct
  REGION 1..127: note = Synthetic
EVQLVESGGGLVKPGGSLRLSCVASGFTFSSYSMNWVRQAPGKGLEWLLSISSSSSYKYYGDSVKGRFTISRDNANNTLYLQMSRLRAEDTAVYFCARDLVEGGDLGIIGSYYMDVWGKGTTVTVSS

SEQ ID NO: 2758 - protein, 20 aa, synthetic construct
  REGION 1..20: note = Synthetic
ARDLVEGGDLGIIGSYYMDV

SEQ ID NO: 2759 - protein, 107 aa, synthetic construct
  REGION 1..107: note = Synthetic
AIQMTQSPXTLSASVGDRVTITCRASQGIRNDLGWYQQKPGKAPKLLISAASSLQSGVPSRFSGGGSGTVFTLTISSLQPEDFATYYCLQDYIYPRTFGQGTKLEIK

SEQ ID NO: 2760 - protein, 9 aa, synthetic construct
  REGION 1..9: note = Synthetic
LQDYIYPRT

SEQ ID NO: 2761 - protein, 126 aa, synthetic construct
  REGION 1..126: note = Synthetic
EVQLVQSGAEVKEPGESLKISCKVSGYKFTTDWIGWVRQMPGKGLEWMGIIYPLDSAPRYSPSFQGQVTISADKSISTAYLQWSSLKASDTAMYYCAGARGYCSSFSCYHDGFDIWGQGTVVTVSS

SEQ ID NO: 2762 - protein, 19 aa, synthetic construct
  REGION 1..19: note = Synthetic
AGARGYCSSFSCYHDGFDI

SEQ ID NO: 2763 - protein, 113 aa, synthetic construct
  REGION 1..113: note = Synthetic
DIVMTQTPLSLPVTPGEPASISCRSSQSLLDSDDGNTYLDWYLQKPGQSPQVLIYTLSYRASGVPDRFSGSGSGTDFTLKISRVEAEDVGIYYCMQRIEFPWTFGQGTKVEIK

SEQ ID NO: 2764 - protein, 9 aa, synthetic construct
  REGION 1..9: note = Synthetic
MQRIEFPWT

SEQ ID NO: 2765 - protein, 123 aa, synthetic construct
  REGION 1..123: note = Synthetic
QLQLQESGPGLVKPSEALSLTCTVSGGSISSNSHYWDWIRQPPGKGLEWIGTIFYTGTTYYNPSLNSRVSISVDTSQNQFSLKLTSVTASDTAVYYCAAREFDWSGYNWFDPWGQGALVTVSS

SEQ ID NO: 2766 - protein, 15 aa, synthetic construct
  REGION 1..15: note = Synthetic
AAREFDWSGYNWFDP

SEQ ID NO: 2767 - protein, 107 aa, synthetic construct
  REGION 1..107: note = Synthetic
DIQMTQSPVSLSASVGDRVTITCRTSQGIRNDLGWYQQKPGKAPKRLIYATSSLHSGVPSRFSGSGSGTEFTLTISSLQPEDFATYYCLQHNSYPITFGQGTRLEIK

SEQ ID NO: 2768 - protein, 9 aa, synthetic construct
  REGION 1..9: note = Synthetic
LQHNSYPIT

SEQ ID NO: 2769 - protein, 124 aa, synthetic construct
  REGION 1..124: note = Synthetic
EVQLVQSGAEVKKPGESLKISCQGSGYTFTDYWIGWVRQMPGKGLEWMGIIHPSDSDTRYSPSFQGQVTISADKSINTAYLQWSRLKVSDTAMYYCARQALYLDNWSGNALDFWGQGTLLTVSS

SEQ ID NO: 2770 - protein, 17 aa, synthetic construct
  REGION 1..17: note = Synthetic
ARQALYLDNWSGNALDF

SEQ ID NO: 2771 - protein, 107 aa, synthetic construct
  REGION 1..107: note = Synthetic
DIQMTQSPSTLSASVGDRVTITCRASQSITNYLAWYQQKPGKAPKLLIYKASNLESGVPSRFSGRGSGTELTLTISSLQPDDFATYYCQQYYNYPWTFGQGTKVEIK

SEQ ID NO: 2772 - protein, 9 aa, synthetic construct
  REGION 1..9: note = Synthetic
QQYYNYPWT

SEQ ID NO: 2773 - protein, 129 aa, synthetic construct
  REGION 1..129: note = Synthetic
QVQLQESGPRLVKPSQTVSLTCSVSGGSVTNGGSYWTWIRQHPGKGLEWMGHIHYSGSTSYNPSLKSRLNISIDTSKNQFFLTLTSVTVADTAVYYCARDVPLLYCSRSTCSPGAFDTWGQGTMVIVSS

SEQ ID NO: 2774 - protein, 21 aa, synthetic construct
  REGION 1..21: note = Synthetic
ARDVPLLYCSRSTCSPGAFDT

SEQ ID NO: 2775 - protein, 112 aa, synthetic construct
  REGION 1..112: note = Synthetic
DIVMTQSPXXLPVTPGEPASISCRSSQRLLHNNGNNYLDWYLQKPGQSPQLLIYLGSNRASGVPDRFSGSGSGTDFTLKISRVEAEDFGVYYCMQPLQTPYTFGQGTKLEIK

SEQ ID NO: 2776 - protein, 9 aa, synthetic construct
  REGION 1..9: note = Synthetic
MQPLQTPYT

SEQ ID NO: 2777 - protein, 126 aa, synthetic construct
  REGION 1..126: note = Synthetic
EVQLVESGGGLVQPGGSLRLSCVVSGLTPSTYWMHWVRQAPGKGLVWVSRISSDGSTKQYADSVKGRFAVSRDNAKNTLFLQMNSLRAEDTAIYYCAKGPGGSGVDYFYFYYMDVWGKGTTVTVSS

SEQ ID NO: 2778 - protein, 19 aa, synthetic construct
  REGION 1..19: note = Synthetic
AKGPGGSGVDYFYFYYMDV

SEQ ID NO: 2779 - protein, 107 aa, synthetic construct
  REGION 1..107: note = Synthetic
EIVLTQSPGTLSLSPGERATLFCRASQSVSSNYLAWYQQKPGQAPRLLIYGASSRATGIPDRFSGSGSGTDFTLIINRLEPEDFAVYYCQQYTSSNTFGQGTKLEIK

SEQ ID NO: 2780 - protein, 8 aa, synthetic construct
  REGION 1..8: note = Synthetic
QQYTSSNT

SEQ ID NO: 2781 - protein, 125 aa, synthetic construct
  REGION 1..125: note = Synthetic
EVQLVESGGGLVQPGGSLRLACAASGFPVSSNYMSWVRQAPGKGLEWVSVIYSGGTTDYADSVKGRFTISRDNSKNTLYLQMNSLRTEDTAVYYCARATPFCAGDCNFGDAFDIWGQGTMVTVTS

SEQ ID NO: 2782 - protein, 19 aa, synthetic construct
  REGION 1..19: note = Synthetic
ARATPFCAGDCNFGDAFDI

SEQ ID NO: 2783 - protein, 107 aa, synthetic construct
  REGION 1..107: note = Synthetic
DIQMTQSPSTLSASIGDRVTLTCRASQSIRTWLAWYQQKPGKAPKLLISTASSLQSGVPSRFTGSGSGTQFTLTISSLQPDDFATYYCQQYNILPLTFGGGTKVEIK

SEQ ID NO: 2784 - protein, 9 aa, synthetic construct
  REGION 1..9: note = Synthetic
QQYNILPLT

SEQ ID NO: 2785 - protein, 118 aa, synthetic construct; identical to SEQ ID NO: 533
  REGION 1..118: note = Synthetic

SEQ ID NO: 2786 - protein, 11 aa, synthetic construct
  REGION 1..11: note = Synthetic
AKDLGSYFPDY

SEQ ID NO: 2787 - protein, 108 aa, synthetic construct; identical to SEQ ID NO: 534
  REGION 1..108: note = Synthetic

SEQ ID NO: 2788 - protein, 10 aa, synthetic construct
  REGION 1..10: note = Synthetic
LQYNSYPRVT

SEQ ID NO: 2789 - protein, 121 aa, synthetic construct
  REGION 1..121: note = Synthetic
QLQLQESGSGLVKPSQTLSLTCAVSGGSISSGGSSWSWIRQPPGKGLEWIGYIFHSGSTHYNPSLASRVTISIDRSKNQFSLSLTSVTAADTAVYYCASSYDFWTAYLDFWGQGTPVTVSS

SEQ ID NO: 2790 - protein, 13 aa, synthetic construct
  REGION 1..13: note = Synthetic
ASSYDFWTAYLDF

SEQ ID NO: 2791 - protein, 107 aa, synthetic construct
  REGION 1..107: note = Synthetic
DIQMTQSPVSLSASVGDRVTITCRASQGIRNDLGWFQQKPGKAPKRLLYAASSLQSGVPSRFSGSGSGTDFTLTISSLQPEDFATYYCLQYNSYPWTFGQGTKVEIK

SEQ ID NO: 2792 - protein, 9 aa, synthetic construct
  REGION 1..9: note = Synthetic
LQYNSYPWT

SEQ ID NO: 2793 - protein, 128 aa, synthetic construct
  REGION 1..128: note = Synthetic
EVQLVQSGAEVKKPGESLKISCKDSGYRFTNHWIGWVRQMPGKGLEWMGVIYPEDSNTRYSPSFQGQVTISADKSISTAYLQWISLKASDTAIYYCARPDCVNCCSGGSCYFDAFDIWGQGTLVTVSS

SEQ ID NO: 2794 - protein, 21 aa, synthetic construct
  REGION 1..21: note = Synthetic
ARPDCVNCCSGGSCYFDAFDI

SEQ ID NO: 2795 - protein, 113 aa, synthetic construct
  REGION 1..113: note = Synthetic
DIVMTQTPXXLSVTPGEPASISCRSSQSLFDSDDGNIYLDWYLQKPGQSPQLLIYLLSYRASGVPDRFSGSGSGTDFTLKISRVEAEDVGVYYCMQRIEFPWTFGQGTKVEIK

SEQ ID NO: 2796 - protein, 9 aa, synthetic construct
  REGION 1..9: note = Synthetic
MQRIEFPWT

SEQ ID NO: 2797 - protein, 126 aa, synthetic construct
  REGION 1..126: note = Synthetic
QVQLVESGGGVVQPGGSLRLSCVASGFTFSNYAMHWVRQAPGKGLEWLAMTSSGGGDTYYADSLEGRFTVSRDNFRNTLFLQLNSLRPEDTAVYYCARDLFDTSGYLQIVGVFDICGQGTMVTVSS

SEQ ID NO: 2798 - protein, 19 aa, synthetic construct
  REGION 1..19: note = Synthetic
ARDLFDTSGYLQIVGVFDI

SEQ ID NO: 2799 - protein, 107 aa, synthetic construct
  REGION 1..107: note = Synthetic
DIQMTQSPVSLSASVGDRVTITCRASQSISNWLAWYQQKPGKAPKVLIHKASTLESGVPSRFSGSEFGTDFTLTISSLQADDFATYYCQQYYSYPLTFGQGTKVEIK

SEQ ID NO: 2800 - protein, 9 aa, synthetic construct
  REGION 1..9: note = Synthetic
QQYYSYPLT

SEQ ID NO: 2801 - protein, 122 aa, synthetic construct
  REGION 1..122: note = Synthetic
QVQLVQSGPEVKKPGASVKVSCKVSGYTLIELGMHWVRQAPGKGLEWMGGFDPENVKTIYAQKFQGRVTMTEDTSTDTAYMELRSLTSEDTAIYYCATAGPLPYYYYCLDVWGQGTTVSVSS

SEQ ID NO: 2802 - protein, 15 aa, synthetic construct
  REGION 1..15: note = Synthetic
ATAGPLPYYYYCLDV

SEQ ID NO: 2803 - protein, 109 aa, synthetic construct; identical to SEQ ID NO: 492
  REGION 1..109: note = Synthetic

SEQ ID NO: 2804 - protein, 10 aa, synthetic construct
  REGION 1..10: note = Synthetic
QYYDTSPMYT

SEQ ID NO: 2805 - protein, 125 aa, synthetic construct
  REGION 1..125: note = Synthetic
EVQLVQSGAEVKKPGESLKISCKGSGYRFTIGWVRQMPGKGLEWMGIIYPDDSDTKYSPSFQGHVTISADRSISTAYLQWSSLKASDTAMYFCARADCVNCCSGGSCYFDTFDIWGQGTMVTVSS

SEQ ID NO: 2806 - protein, 21 aa, synthetic construct
  REGION 1..21: note = Synthetic
ARADCVNCCSGGSCYFDTFDI

SEQ ID NO: 2807 - protein, 113 aa, synthetic construct
  REGION 1..113: note = Synthetic
DIVMTQTPVXLSVTPEEPASISCRSNQSLLDSDDGNTYLDWYLQRPGQSPQLLIYMLSYRASGVPDRFSGSGSGTDFTLKISRVEAEDVGVYYCMQRIEFPWTFGQGTKVEIK

SEQ ID NO: 2808 - protein, 9 aa, synthetic construct
  REGION 1..9: note = Synthetic
MQRIEFPWT

SEQ ID NO: 2809 - protein, 124 aa, synthetic construct
  REGION 1..124: note = Synthetic
EVQLVESGGGLVQPGGSLRLSCTASGFTFNDHWMNWVRQAPGKGLEWVASIKHDGNEKYYVDSVKGRFTISRDNAKNSVYLQMNSLRADDTAIYYCARGARFLEWLPQSPFDYWGQGTLVIVSS

SEQ ID NO: 2810 - protein, 17 aa, synthetic construct
  REGION 1..17: note = Synthetic
ARGARFLEWLPQSPFDY

SEQ ID NO: 2811 - protein, 107 aa, synthetic construct
  REGION 1..107: note = Synthetic
DIQMTQSPSSLSASVGDRVTITCRASQDISNSLAWYQQKPGKAPKFLLYAASRLGSGIPSRFSGSGSGTDYTLTISSLQPEDFAIYYCQQYYDTPLTFGGGTKVQIK

SEQ ID NO: 2812 - protein, 9 aa, synthetic construct
  REGION 1..9: note = Synthetic
QQYYDTPLT

SEQ ID NO: 2813 - protein, 122 aa, synthetic construct
  REGION 1..122: note = Synthetic
EVQLLESGGGLIQPGGSLRLSCAASGFMFSNYAMSWVRQAPGKGLEWVSTVNGGSGGATYYADSVKGRFTISRDNSKNTLYLQMNSLRTEDTAIYYCTKESNWTPQDRFEYWGQGILVTVSS

SEQ ID NO: 2814 - protein, 14 aa, synthetic construct
  REGION 1..14: note = Synthetic
TKESNWTPQDRFEY

SEQ ID NO: 2815 - protein, 107 aa, synthetic construct
  REGION 1..107: note = Synthetic
EIVMTQSPXXLSVSPGERATLSCRASQSVSRNLAWYQQKPGQSPRLLISGASTRATGIPARFSGSGSGTEFTLSISSLQPEDSAVYYCQHYNNWPRTFGHGTKVEIK

SEQ ID NO: 2816 - protein, 9 aa, synthetic construct
  REGION 1..9: note = Synthetic
QHYNNWPRT

SEQ ID NO: 2817 - protein, 126 aa, synthetic construct
  REGION 1..126: note = Synthetic
EVQLVESGGGLVQPGGSLRLSCVVSGLTRSNYWVHWVRQVPGKGLVWVSRISSDGTTRNYADSVKGRFTMSRDNAKNTMYLQMNSLRAEDTAVYFCAKGPGGSGVDYFYFYYMDAWGNGTTVTVSS

SEQ ID NO: 2818 - protein, 19 aa, synthetic construct
  REGION 1..19: note = Synthetic
AKGPGGSGVDYFYFYYMDA

SEQ ID NO: 2819 - protein, 107 aa, synthetic construct
  REGION 1..107: note = Synthetic
EIVLTQSPGTLSLSPGERATLSCRASQSVGNNYLAWYQQKLGQAPRLLIYGASSRATGIPDRFSGSGSGTDFTLTINRLEPEDFAVYYCQQYGNLYTFGQGTKLEIK

SEQ ID NO: 2820 - protein, 8 aa, synthetic construct
  REGION 1..8: note = Synthetic
QQYGNLYT

SEQ ID NO: 2821 - protein, 128 aa, synthetic construct; identical to SEQ ID NO: 503
  REGION 1..128: note = Synthetic

SEQ ID NO: 2822 - protein, 21 aa, synthetic construct
  REGION 1..21: note = Synthetic
ATGYAVTGTPQNYQYYYGLDF

SEQ ID NO: 2823 - protein, 107 aa, synthetic construct
  REGION 1..107: note = Synthetic
EIVLTQSPXTLSLSPGERATLSCRASQSVRNNYLAWYQQKPGQAPRLLIYGVSSRATDIPDRFSGSGSGTDFTLTISRLEPEDFAVYYCQKYGSSHSFGQGTKLEIK

SEQ ID NO: 2824 - protein, 8 aa, synthetic construct
  REGION 1..8: note = Synthetic
QKYGSSHS

SEQ ID NO: 2825 - protein, 122 aa, synthetic construct
  REGION 1..122: note = Synthetic
EVQLVESGGGLVQPGRSLRLSCAASGFTFEDFAMHWVRQAPGKGLEWVSSISWNSGIKAYADSVKGRFTISRDNAKNSLYLQMSSLRPEDTAFYHCVKDTDSSGWSHPFDVWGHGTLVSVSS

SEQ ID NO: 2826 - protein, 15 aa, synthetic construct
  REGION 1..15: note = Synthetic
VKDTDSSGWSHPFDV

SEQ ID NO: 2827 - protein, 107 aa, synthetic construct
  REGION 1..107: note = Synthetic
AIQMTQSPSSLSASVGDRVTITCRASQGIRNDLGWYQQKPGKAPKLLIYAASSLQSGVPSRFSGSGSGTDFTLTISSLQPEDFATYYCLQDYNFPRTFGPGTTVDIK

SEQ ID NO: 2828 - protein, 9 aa, synthetic construct
  REGION 1..9: note = Synthetic
LQDYNFPRT

SEQ ID NO: 2829 - protein, 118 aa, synthetic construct
  REGION 1..118: note = Synthetic
EVQLLESGGGFVQRGGSLRLSCVASGFSLSSDAMSWVRQAPGKGPEWVAAISPSATATYYTDSVEGRFTISRDNSKNTLFLQMNSLRAEDTAIYYCAKDPLGLLFFDFWGQGTPVTVS

SEQ ID NO: 2830 - protein, 12 aa, synthetic construct
  REGION 1..12: note = Synthetic
AKDPLGLLFFDF

SEQ ID NO: 2831 - protein, 106 aa, synthetic construct; identical to SEQ ID NO: 512
  REGION 1..106: note = Synthetic

SEQ ID NO: 2832 - protein, 8 aa, synthetic construct
  REGION 1..8: note = Synthetic
QQYNTYST

SEQ ID NO: 2833 - protein, 121 aa, synthetic construct
  REGION 1..121: note = Synthetic
QVQLVESGGGVVQPGRSLRLSCAASGFTLNSYGMHWVRQAPGKGLEWVAVIWFDGSRQYYADSVKGRFTISRDTSRNTLYVQMNSLRVEDTAVYYCARDGGFSGFHYMDVWGKGTTVTVSS

SEQ ID NO: 2834 - protein, 14 aa, synthetic construct
  REGION 1..14: note = Synthetic
ARDGGFSGFHYMDV

SEQ ID NO: 2835 - protein, 108 aa, synthetic construct
  REGION 1..108: note = Synthetic
EIVLTQSPXSLSLSPGERVTLSCRASQIIISSYLAWYQQKPGQAPRLLIYGASSRATGIPDRFSGSGSGTDFTLTISRLEPEDFAVYYCQHYSTSLYTFGQGTKLEIK

SEQ ID NO: 2836 - protein, 9 aa, synthetic construct
  REGION 1..9: note = Synthetic
QHYSTSLYT

SEQ ID NO: 2837 - protein, 128 aa, synthetic construct; identical to SEQ ID NO: 493
  REGION 1..128: note = Synthetic

SEQ ID NO: 2838 - protein, 21 aa, synthetic construct
  REGION 1..21: note = Synthetic
ARPDCVNCCSGGSCYVDAFDV

SEQ ID NO: 2839 - protein, 113 aa, synthetic construct; identical to SEQ ID NO: 494
  REGION 1..113: note = Synthetic

SEQ ID NO: 2840 - protein, 9 aa, synthetic construct
  REGION 1..9: note = Synthetic
MQRIEFPWT

SEQ ID NO: 2841 - protein, 122 aa, synthetic construct
  REGION 1..122: note = Synthetic
QVQLVQSGVEVKKPGASVKVSCKAFGYTFSXCSRCSVEQRRRSXGHQRRCXRSPMGTPSAATKFQGRVTMTTDTSTSTAYVELRSLRYDDTAVYYCARDHRAVSTFGTYDHWGQGTLVTVSS

SEQ ID NO: 2842 - protein, 15 aa, synthetic construct
  REGION 1..15: note = Synthetic
ARDHRAVSTFGTYDH

SEQ ID NO: 2843 - protein, 106 aa, synthetic construct
  REGION 1..106: note = Synthetic
DIQMTQSPSSLSASVGDRVTITCRTSQSISRFLNWYQQKPGKAPKLLIYAASGLQSGVPSRFSGSGSGTDFTLTITSLQPEDFATYYCQQSYRTPFTFGPGTKVDV

SEQ ID NO: 2844 - protein, 9 aa, synthetic construct
  REGION 1..9: note = Synthetic
QQSYRTPFT

SEQ ID NO: 2845 - protein, 124 aa, synthetic construct; identical to SEQ ID NO: 525
  REGION 1..124: note = Synthetic

SEQ ID NO: 2846 - protein, 17 aa, synthetic construct
  REGION 1..17: note = Synthetic
AKDPHPYSSSWYGWLDP

SEQ ID NO: 2847 - protein, 107 aa, synthetic construct; identical to SEQ ID NO: 526
  REGION 1..107: note = Synthetic

SEQ ID NO: 2848 - protein, 9 aa, synthetic construct
  REGION 1..9: note = Synthetic
LQHNTYPLT

SEQ ID NO: 2849 - protein, 123 aa, synthetic construct
  REGION 1..123: note = Synthetic
EVQLLESGGGLVQPGGSLRLSCAASGFTFTSYAMNWVRQAPGKGLEWVSAISISGGSTYYPDSVKGRFTISRDNAKNTLYLQMNSLRAEDTAVYYCAKDSSSGIVGATYFDYWGQGTLVTVFS

SEQ ID NO: 2850 - protein, 16 aa, synthetic construct
  REGION 1..16: note = Synthetic
AKDSSSGIVGATYFDY

SEQ ID NO: 2851 - protein, 108 aa, synthetic construct
  REGION 1..108: note = Synthetic
DIQMTQSPXXLSASVGDRVTITCQASQDISNYLNWYQQKPGKAPKLLIYDTSNLKTGVPSRFSGSGSGTDFTFTISSLQPEDIATYYCQQYDNLPPVTFGGGTKVEIK

SEQ ID NO: 2852 - protein, 10 aa, synthetic construct
  REGION 1..10: note = Synthetic
QQYDNLPPVT

SEQ ID NO: 2853 - protein, 123 aa, synthetic construct; identical to SEQ ID NO: 495
  REGION 1..123: note = Synthetic

SEQ ID NO: 2854 - protein, 15 aa, synthetic construct
  REGION 1..15: note = Synthetic
ARDVETYKYESTLDC

SEQ ID NO: 2855 - protein, 106 aa, synthetic construct; identical to SEQ ID NO: 496
  REGION 1..106: note = Synthetic

SEQ ID NO: 2856 - protein, 9 aa, synthetic construct
  REGION 1..9: note = Synthetic
LQHNSYPLT

SEQ ID NO: 2857 - protein, 121 aa, synthetic construct
  REGION 1..121: note = Synthetic
EVQLLESGGGLVQPGGSLRLFCAASGFSFPTSAMNWVRQAPGKGLEWVSGVSGSGGSTYYSDSVKGRSSISRDNSNSGLYLQINSLRAEDTAVYFCAKGRYTLSPGYLDSWGQGTPVTVSS

SEQ ID NO: 2858 - protein, 14 aa, synthetic construct
  REGION 1..14: note = Synthetic
AKGRYTLSPGYLDS

SEQ ID NO: 2859 - protein, 107 aa, synthetic construct
  REGION 1..107: note = Synthetic
DIQMTQSPSSLSASVGDRVTITCQASQDISNYLNWYEPESSQLLCICMRQSHHHQPGVPSRFSGSGSGTDFTFTISSLQPEDFATYYCQQYGNLPLTFGGGTKVEIK

SEQ ID NO: 2860 - protein, 9 aa, synthetic construct
  REGION 1..9: note = Synthetic
QQYGNLPLT

SEQ ID NO: 2861 - protein, 124 aa, synthetic construct; identical to SEQ ID NO: 527
  REGION 1..124: note = Synthetic

SEQ ID NO: 2862 - protein, 17 aa, synthetic construct
  REGION 1..17: note = Synthetic
AKDGGLRYQLMSDGMDV

SEQ ID NO: 2863 - protein, 112 aa, synthetic construct
  REGION 1..112: note = Synthetic
DVVMTQSPXSLPVTLGQPASISCRSSHSLVYSDGNTYLNWFQQRPGQSPRRLIYKVSTRDSGVPDRFSGSGSGTDFTLKISRVEAEDVGVYYCMQSIFWPRTFGQGTKLEIK

SEQ ID NO: 2864 - protein, 9 aa, synthetic construct
  REGION 1..9: note = Synthetic
MQSIFWPRT

SEQ ID NO: 2865 - protein, 121 aa, synthetic construct
  REGION 1..121: note = Synthetic
QVQLQQWGAGLLKPSETLSLSCAVSGGSFSGYYWTWIRQTPGKGLEWIGEIIHNGNTNYNPSLKSRVTISLDTSKNQFSLKLSSVTAADTAVYFCARGHPLVVVVKGFDPWGQGTLVTVSS

SEQ ID NO: 2866 - protein, 15 aa, synthetic construct
  REGION 1..15: note = Synthetic
ARGHPLVVVVKGFDP

SEQ ID NO: 2867 - protein, 107 aa, synthetic construct
  REGION 1..107: note = Synthetic
DIQMTQSPXXLSASVGDRVTITCRASQGIRNDLGWYQQKPGKAPKSLIYAASSLESGVPSRFSGSGSGTEFTLTISSLQPEDFAIYYCLQHNSYPRTFGQGTKLEIK

SEQ ID NO: 2868 - protein, 9 aa, synthetic construct
  REGION 1..9: note = Synthetic
LQHNSYPRT

SEQ ID NO: 2869 - protein, 122 aa, synthetic construct
  REGION 1..122: note = Synthetic
QVQLVESGGGVVQPGGSLRLSCAASGFTFSSYGMHWVRQAPGKGLEWVAVISPDAINKYYVDSVKGRFTMSRDNSKNTLYLQMNSLRAEDTAVYYCAKAKGGGFFYYYLDVWGKGTTVTVSS

SEQ ID NO: 2870 - protein, 15 aa, synthetic construct
  REGION 1..15: note = Synthetic
AKAKGGGFFYYYLDV

SEQ ID NO: 2871 - protein, 107 aa, synthetic construct
  REGION 1..107: note = Synthetic
DIQMTQSPSSLSASVGDRVTITCRASHDINIYLAWFQQKPGKAPKSLIYSASSLQSGVPSKFSGSGSGTDFTLTISSLQPEDFATYYCQQYNIFPPTFGQGTKVDIK

SEQ ID NO: 2872 - protein, 9 aa, synthetic construct
  REGION 1..9: note = Synthetic
QQYNIFPPT

SEQ ID NO: 2873 - protein, 126 aa, synthetic construct; identical to SEQ ID NO: 505
  REGION 1..126: note = Synthetic

SEQ ID NO: 2874 - protein, 19 aa, synthetic construct
  REGION 1..19: note = Synthetic
ARDLFDTSGYLQIVGVFDV

SEQ ID NO: 2875 - protein, 107 aa, synthetic construct
  REGION 1..107: note = Synthetic
DIQMTQSPXXLSASVGDRVTITCRASQSISNWLAWYQQKPGKAPKVLIHKASTLESGVPSRFSGSEFGTDFTLTISSLQADDFATYYCQQYYSYPLTFGQGTKVEIK

SEQ ID NO: 2876 - protein, 9 aa, synthetic construct
  REGION 1..9: note = Synthetic
QQYYSYPLT

SEQ ID NO: 2877 - protein, 118 aa, synthetic construct
  REGION 1..118: note = Synthetic
QVQLVQSGTEVKQPGASVKVSCKASGYIYTSYGISWLRQAPGQGLEWMGWLSAYSGNTDYSQKFQGRVTMTTDTSTGTAYLELRSLRSDDTAVYYCARDSQWELLDSWGQGTLVTVSS

SEQ ID NO: 2878 - protein, 11 aa, synthetic construct
  REGION 1..11: note = Synthetic
ARDSQWELLDS

SEQ ID NO: 2879 - protein, 108 aa, synthetic construct
  REGION 1..108: note = Synthetic
EIVMTQSPATLSVSPGDRAALSCRASQTVYNNLAWFQQRPGQAPRLLIQDASTRATGIPARFSGSGSGTEFTLTIDSLQSEDFAVYYCQQYNDWPMYTFGQGTKLEIK

SEQ ID NO: 2880 - protein, 10 aa, synthetic construct
  REGION 1..10: note = Synthetic
QQYNDWPMYT

SEQ ID NO: 2881 - protein, 124 aa, synthetic construct; identical to SEQ ID NO: 519
  REGION 1..124: note = Synthetic

SEQ ID NO: 2882 - protein, 17 aa, synthetic construct
  REGION 1..17: note = Synthetic
ATMNSGTLVNGELTPDY

SEQ ID NO: 2883 - protein, 107 aa, synthetic construct
  REGION 1..107: note = Synthetic
DIQMTQSPSSLSASVGDRVTITCRASQRISGFLNWYQQKPGKAPELLISAASRLQSGVPSRFSGSGSGTDFTLTISSLQPEDFATYYCQQSYITPITFGQGTRLDIK

SEQ ID NO: 2884 - protein, 9 aa, synthetic construct
  REGION 1..9: note = Synthetic
QQSYITPIT

SEQ ID NO: 2885 - protein, 123 aa, synthetic construct
  REGION 1..123: note = Synthetic
EVQLLESGGGLVQPGGSLRLSCAASGFTFGIYAMSWVRQAPGKGLEWVSTISLTGGSTYYADSVKGRFTISRDNSKNTLYLQMNSLRVEDTAVYYCAKDSQSGIVGPKILAYWGQGSVVTVSS

SEQ ID NO: 2886 - protein, 16 aa, synthetic construct
  REGION 1..16: note = Synthetic
AKDSQSGIVGPKILAY

SEQ ID NO: 2887 - protein, 107 aa, synthetic construct
  REGION 1..107: note = Synthetic
DIQMTQSPVSLSASVGDRVTITCQASQGISNSLNWYQQRPGKAPMLLIYDVSNLATGVPSRFSGSGSGTDFSFSISSLQPDDFATYYCQQYHHLPLTFGGGTRVEIK

SEQ ID NO: 2888 - protein, 9 aa, synthetic construct
  REGION 1..9: note = Synthetic
QQYHHLPLT

SEQ ID NO: 2889 - protein, 120 aa, synthetic construct
  REGION 1..120: note = Synthetic
EVQLVESGGGLAQPGGSLRLSCAASGFTFSNYNMNWVRQAPGKGLEWLSYISGSSSTIFYADSVKGRFTTSRDNAKNSLYLQMNSLRDDDTAMYYCARDGYIMTTIDDYWGQGTLVTVTS

SEQ ID NO: 2890 - protein, 13 aa, synthetic construct
  REGION 1..13: note = Synthetic
ARDGYIMTTIDDY

SEQ ID NO: 2891 - protein, 108 aa, synthetic construct
  REGION 1..108: note = Synthetic
DIQMTQSXXSLSASVGDRVTITCRSSQAMRNDLAWYQQKPGKAPKCLIYAASILQSGVPSRFSGSGSGTEFTLTINSLQPEDFATYYCLQYNSYPRKTFGQGTKVEFK

SEQ ID NO: 2892 - protein, 10 aa, synthetic construct
  REGION 1..10: note = Synthetic
LQYNSYPRKT

SEQ ID NO: 2893 - protein, 121 aa, synthetic construct
  REGION 1..121: note = Synthetic
QVQLVESGGGVVQPGRSLRLSCAASGFSFSSYGMHWVRQVPGKGLEWVAVIWYDGSNKYYADSVKGRFTISRDNSKNTLFLQMNSLRAEDTAVYYCARDSSGYSMNWFDPWGQGTLVTVSS

SEQ ID NO: 2894 - protein, 14 aa, synthetic construct
  REGION 1..14: note = Synthetic
ARDSSGYSMNWFDP

SEQ ID NO: 2895 - protein, 107 aa, synthetic construct
  REGION 1..107: note = Synthetic
DIQMTQSPXSLSASLGDRITITCRASQTINTYLNWYQQKPGKAPKLLISSTSSLQSGVPSRFSGSGSGTDFTLTISSLQPEDFATYYCQQSYRTPFTFGQGTRLDIK

SEQ ID NO: 2896 - protein, 9 aa, synthetic construct
  REGION 1..9: note = Synthetic
QQSYRTPFT

SEQ ID NO: 2897 - protein, 127 aa, synthetic construct; identical to SEQ ID NO: 507
  REGION 1..127: note = Synthetic

SEQ ID NO: 2898 - protein, 20 aa, synthetic construct
  REGION 1..20: note = Synthetic
ARDLVEGGDLGRVGSYYMDV

SEQ ID NO: 2899 - protein, 107 aa, synthetic construct
  REGION 1..107: note = Synthetic
AIQMTQSPXXLSASVGDTVTITCRASQGIRNDLGWYQHKPGRAPKLLISAASTLQSGVPSRFTGSGSGTVFTLTISSLQPEDFATYYCLQDYLYPRTFGQGTKLEIK

SEQ ID NO: 2900 - protein, 9 aa, synthetic construct
  REGION 1..9: note = Synthetic
LQDYLYPRT

SEQ ID NO: 2901 - protein, 126 aa, synthetic construct; identical to SEQ ID NO: 547
  REGION 1..126: note = Synthetic

SEQ ID NO: 2902 - protein, 19 aa, synthetic construct
  REGION 1..19: note = Synthetic
AKQGSSGITMEEVVIPFDY

SEQ ID NO: 2903 - protein, 107 aa, synthetic construct
  REGION 1..107: note = Synthetic
DIQMTQSPXXLSASVGDRVTITCRASQSISRYLNWYQQRPGKAPKLLIYAASSLQSGVPSRFSGSGSGTDFTLTIRSLQPEDFATYYCHQSYSTLWTFGQGTKVEIK

SEQ ID NO: 2904 - protein, 9 aa, synthetic construct
  REGION 1..9: note = Synthetic
HQSYSTLWT

SEQ ID NO: 2905 - protein, 126 aa, synthetic construct
  REGION 1..126: note = Synthetic
EVQLLESGGGLGQPGGSLRLSCAASGFTFNKYALSWVRQAPGKGLEWVSSIGVISGSTYYADSVKGRFTISRDTSKNTVFLQMNSLRAEDTAVYYCAKDNYYDESGYYRTDAFDIWGQGTMVTVSS

SEQ ID NO: 2906 - protein, 19 aa, synthetic construct
  REGION 1..19: note = Synthetic
AKDNYYDESGYYRTDAFDI

SEQ ID NO: 2907 - protein, 107 aa, synthetic construct
  REGION 1..107: note = Synthetic
DIQMTQSPSSLSASLGDRVTITCRASQHIGRWLAWYQQTPGKAPKSLIYGASSLQTGVPSRFSGSGSGTDFTLTISSLQPEDFATYYCQQYMNKPITFGQGTRLEIK

SEQ ID NO: 2908 - protein, 9 aa, synthetic construct
  REGION 1..9: note = Synthetic
QQYMNKPIT

SEQ ID NO: 2909 - protein, 122 aa, synthetic construct
  REGION 1..122: note = Synthetic
QVQLVQSGAEVKKPGASVKVSCMASGYNLSNYGISWVRQAPGQGLEWIGWSSVDNGHTNYAQKFQARVSMTTDTSTSTVYLELRSLRSDDTAVYFCARDHRTVVTFGTFDYWGQGVPVTVSS

SEQ ID NO: 2910 - protein, 15 aa, synthetic construct
  REGION 1..15: note = Synthetic
ARDHRTVVTFGTFDY

SEQ ID NO: 2911 - protein, 107 aa, synthetic construct
  REGION 1..107: note = Synthetic
DIQMTQSPVSLSASVGDRVTITCRASHNINTFLNWYQQKPGKAPNLLIYAPSILQSGVPPRFSGSGFGTDFTLTISSLQPDDFATYYCQQTYRTPFTFGPGTKVDVK

SEQ ID NO: 2912 - protein, 9 aa, synthetic construct
  REGION 1..9: note = Synthetic
QQTYRTPFT

SEQ ID NO: 2913 - protein, 126 aa, synthetic construct
  REGION 1..126: note = Synthetic
QVQLVQSGAEVKKPGASVTVSCKVSGYTLTELSVHWVRQAPGKGLEWMGGFDPEDGETIYAQKFQGRVTMTEDTSTDTAYMELRSLRSEDTAVYYCATDSYDFVRGNLHNYGMDGWGQGTTVIVSS

SEQ ID NO: 2914 - protein, 19 aa, synthetic construct
  REGION 1..19: note = Synthetic
ATDSYDFVRGNLHNYGMDG

SEQ ID NO: 2915 - protein, 107 aa, synthetic construct
  REGION 1..107: note = Synthetic
DIQMTQSPSSLSASVGDRVTITCRASQGIRNDLGWYQQKPGKAPKRLIYAASSLQGGVPSRFSGSGSGTEFTLTISSLQSEDFATYYCLQHNSYPWTFGQGTKVEIK

SEQ ID NO: 2916 - protein, 9 aa, synthetic construct
  REGION 1..9: note = Synthetic
LQHNSYPWT

SEQ ID NO: 2917 - protein, 121 aa, synthetic construct; identical to SEQ ID NO: 499
  REGION 1..121: note = Synthetic

SEQ ID NO: 2918 - protein, 15 aa, synthetic construct
  REGION 1..15: note = Synthetic
ARGHPLVVVVKGFDP

SEQ ID NO: 2919 - protein, 107 aa, synthetic construct
  REGION 1..107: note = Synthetic
DIQMTQSPVTLSASVGDRVTITCRASQGIRNELGWYQQKPGKAPKPLIYAASSLQSGVPSRFSGSGSGTEFTLTISSLQPEDFATYYCLQHYTYPRTFGQGTKLEIK

SEQ ID NO: 2920 - protein, 9 aa, synthetic construct
  REGION 1..9: note = Synthetic
LQHYTYPRT

SEQ ID NO: 2921 - protein, 121 aa, synthetic construct
  REGION 1..121: note = Synthetic
EVQLVESGGGLVQPGGSLRLSCTASGFTISQFWMNWVRQAPGKGLEWVANINQDGSQTYYLDSVMGRFTISRDNAKNSLYLQMNSLRAEDAAVYYCAKAGLNWEILPYLDYWGQGTLVPVS

SEQ ID NO: 2922 - protein, 15 aa, synthetic construct
  REGION 1..15: note = Synthetic
AKAGLNWEILPYLDY

SEQ ID NO: 2923 - protein, 107 aa, synthetic construct
  REGION 1..107: note = Synthetic
AIQMTQSPXXLSASVGDRVKITCRASQAIRDDLGWYQQKPGKAPKLLIYAASSLQSGVPSRFSGSGSGTDFTLTISSLQPEDFATYYCLQNYNYPLTFGGGTKVEIK

SEQ ID NO: 2924 - protein, 9 aa, synthetic construct
  REGION 1..9: note = Synthetic
LQNYNYPLT

SEQ ID NO: 2925 - protein, 124 aa, synthetic construct; identical to SEQ ID NO: 521
  REGION 1..124: note = Synthetic

SEQ ID NO: 2926 - protein, 17 aa, synthetic construct
  REGION 1..17: note = Synthetic
ARGLRVHEWLATRGMDV

SEQ ID NO: 2927 - protein, 107 aa, synthetic construct
  REGION 1..107: note = Synthetic
DIQMTQSPVXLSASVGDRVTIACRASQDISNSLAWYQQRPGKAPKFLLYAASRLESGVPSRFSGSGSGTDYTLTISSLQPEDFATYYCQQYYDKPLTFGGGTKVEIK

SEQ ID NO: 2928 - protein, 9 aa, synthetic construct
  REGION 1..9: note = Synthetic
QQYYDKPLT

SEQ ID NO: 2929 - protein, 123 aa, synthetic construct; identical to SEQ ID NO: 531
  REGION 1..123: note = Synthetic

SEQ ID NO: 2930 - protein, 17 aa, synthetic construct
  REGION 1..17: note = Synthetic
ARENFDVTSYYNGWFDP

SEQ ID NO: 2931 - protein, 113 aa, synthetic construct
  REGION 1..113: note = Synthetic
DIVMTQSPVXXAVSLGERATINCKSSQSVLYSSNNKNYLAWYQQKPGQPPKLLIYWASTRESGVPDRFSGSGSGTDFTLTISSLQADDVAVYYCQQYYNSPRTFGQGTKVEIK

SEQ ID NO: 2932 - protein, 9 aa, synthetic construct
  REGION 1..9: note = Synthetic
QQYYNSPRT

SEQ ID NO: 2933 - protein, 123 aa, synthetic construct
  REGION 1..123: note = Synthetic
EVQLLESGGGLVQPGGSLRLSCAASGFTFTSSAMNWVRQAPGKGLEWVSGISGSGGSTYYADSVKGRFTISRDNSKNKVYLQMNSLRAEDTAVYFCAKDRFYGIEGPSYFDSWGQGSKVTVSS

SEQ ID NO: 2934 - protein, 16 aa, synthetic construct
  REGION 1..16: note = Synthetic
AKDRFYGIEGPSYFDS

SEQ ID NO: 2935 - protein, 109 aa, synthetic construct
  REGION 1..109: note = Synthetic
EIVLTQSPFSLSLSPGERATLSCRASQSVSSSYLAWYQQKPGQAPRLLIYGASSRATGIPDRFSGGGSGTDFTLTIARLEPEDFAVYYCQQYGSSPRLTFGGGTKVEIK

SEQ ID NO: 2936 - protein, 10 aa, synthetic construct
  REGION 1..10: note = Synthetic
QQYGSSPRLT

SEQ ID NO: 2937 - protein, 121 aa, synthetic construct
  REGION 1..121: note = Synthetic
QVQLVQSGAEVKKPGASVKVSCKVSGYTLSELSMHWVRQSPGKGLEWMGGFDPEDVETIYAEKFQGRVTMTEDTSTDTAYMEMSSLRSEDTAVYYCATVYAILGRRVVDFWGQGTPVTVSP

SEQ ID NO: 2938 - protein, 14 aa, synthetic construct
  REGION 1..14: note = Synthetic
ATVYAILGRRVVDF

SEQ ID NO: 2939 - protein, 113 aa, synthetic construct
  REGION 1..113: note = Synthetic
DIVMTQSPDSLAVSLGERATINCKSSQSVLYSSNNKNYLAWYQQKAGQPPNLIIYWASARESGVPDRFSGSGSGTEFTLTISSLQAEDVAVYYCQQYFNSPLTFGGGTRVEIK

SEQ ID NO: 2940 - protein, 9 aa, synthetic construct
  REGION 1..9: note = Synthetic
QQYFNSPLT

SEQ ID NO: 2941 - protein, 127 aa, synthetic construct
  REGION 1..127: note = Synthetic
QVQLVQSGAEVKKPGASVKVSCKASGYTFTSSYIHWVRQAPGQGFEWMGIINPSGGTTTYAQKFKGRVLMTRDTSTNTVYMELSSLRSEDTAVYYCATFQPYFSDSSAYYQGSYNYWGQGTLVTVSS

SEQ ID NO: 2942 - protein, 20 aa, synthetic construct
  REGION 1..20: note = Synthetic
ATFQPYFSDSSAYYQGSYNY

SEQ ID NO: 2943 - protein, 106 aa, synthetic construct
  REGION 1..106: note = Synthetic
DIQMTQSPVTLSASVGDTVTISCRASQSIDTYLNWYQQRPGKAPKLLIYAASSLQSGVPSRFSGSGSGTDFTLTIRSLQPEDFATYYCQQSYSKITFGPGTKVDVK

SEQ ID NO: 2944 - protein, 8 aa, synthetic construct
  REGION 1..8: note = Synthetic
QQSYSKIT

SEQ ID NO: 2945 - protein, 123 aa, synthetic construct
  REGION 1..123: note = Synthetic
QVQLVQSGAEVKKPGASVKVSCTAAGYSFTNHFMHWVRQAPGQGLEWMGILNPSGGSASLAQKFRGRVTMTTDTSTSTVYMELSSLKSEDTAIYYCAREGVNVVVPAAPFDFWGQGTLVTVSS

SEQ ID NO: 2946 - protein, 16 aa, synthetic construct
  REGION 1..16: note = Synthetic
AREGVNVVVPAAPFDF

SEQ ID NO: 2947 - protein, 109 aa, synthetic construct
  REGION 1..109: note = Synthetic
EIVLTQSPATLSLSPGDRATLSCRASQSVSTYVAWYQQKPGQAPRLLIYDTSHRATGIPARFSGSRSGSDFTLTISSLEPEDFAIYYCQQRSNWPPSITFGQGTRLEIK

SEQ ID NO: 2948 - protein, 11 aa, synthetic construct
  REGION 1..11: note = Synthetic
QQRSNWPPSIT

SEQ ID NO: 2949 - protein, 123 aa, synthetic construct
  REGION 1..123: note = Synthetic
QLQLQESGPGLVKPSETLSLTCIVSGGSISSNSHYWDWIRQPPGKGLEWVGCVYYTGNTYYNPSLQSRVTISVDTSKDQFSLKLTSVTAADTAVYYCARRGVGFSYDTPPDYWGRGALVTVFS

SEQ ID NO: 2950 - protein, 15 aa, synthetic construct
  REGION 1..15: note = Synthetic
ARRGVGFSYDTPPDY

SEQ ID NO: 2951 - protein, 107 aa, synthetic construct
  REGION 1..107: note = Synthetic
DIQMTQSPXXLSASVGDRVTITCRASQGIRNDLGWYQQKPGKAPKCLIYTASSLQSGVPSRFSGSGSGTEFTLTISSLQAEDFATYYCLQYNSYPLTFGGGTKVEIK

SEQ ID NO: 2952 - protein, 9 aa, synthetic construct
  REGION 1..9: note = Synthetic
LQYNSYPLT

SEQ ID NO: 2953 - protein, 124 aa, synthetic construct
  REGION 1..124: note = Synthetic
EVQLVESGGGLAQPGGSLRLSCVASGFTFSGHWMSWVRQAPGKGLEWLANIKLDGSEKYYVDSVKGRFTISRDNAKNSLYLQMNSLRAEDTAVYYCARGARFLEWLPQSPFDFWGQGILVTVSS

SEQ ID NO: 2954 - protein, 17 aa, synthetic construct
  REGION 1..17: note = Synthetic
ARGARFLEWLPQSPFDF

SEQ ID NO: 2955 - protein, 107 aa, synthetic construct
  REGION 1..107: note = Synthetic
DIQMTQSPSSLSASVGDRVTITCRASQDITNSLAWYQHKAGKVPKLLLYAASRLGSGVPSRFSGSRSGTDYTLLISSLQPEDFATYFCQQYYDMPLTFGGGTKVEIK

SEQ ID NO: 2956 - protein, 9 aa, synthetic construct
  REGION 1..9: note = Synthetic
QQYYDMPLT

SEQ ID NO: 2957 - protein, 127 aa, synthetic construct; identical to SEQ ID NO: 529
  REGION 1..127: note = Synthetic

SEQ ID NO: 2958 - protein, 21 aa, synthetic construct
  REGION 1..21: note = Synthetic
ARERFILGSGSESHYNGPFDY

SEQ ID NO: 2959 - protein, 113 aa, synthetic construct
  REGION 1..113: note = Synthetic
DIVMTQSPVTLAVSLGERATINCKSSQSVLFSSNNKNYLAWYQQKPGQPPKLLFYWASTRGSGVPDRFSGSGSGTDFTLTISSLQAEDVAVYYCQQYYNSPRTFGQGTKVEIK

SEQ ID NO: 2960 - protein, 9 aa, synthetic construct
  REGION 1..9: note = Synthetic
QQYYNSPRT

SEQ ID NO: 2961 - protein, 128 aa, synthetic construct
  REGION 1..128: note = Synthetic
EVQLVQSGAEVKKPGESLKISCKGSGYNFANHWIGWVRQMPGKGLEWMGIIYPTESDTIYSPSFQGQVAISVDKSINTAYLQWSSLKASDTAIYYCARPDCVNCCSGGSCYFDAFDLWGQGTMITVSS

SEQ ID NO: 2962 - protein, 21 aa, synthetic construct
  REGION 1..21: note = Synthetic
ARPDCVNCCSGGSCYFDAFDL

SEQ ID NO: 2963 - protein, 113 aa, synthetic construct
  REGION 1..113: note = Synthetic
DIVMTQTPVXLPVTPGEPASISCRSSQSLLDSDDGNIYVDWYLQKPGQSPQLLIYMLSYRASGVPDRFSGSGSGTDFTLKISRVEAEDVGLYYCMQRVEFPWTFGQGTKVEIK

SEQ ID NO: 2964 - protein, 9 aa, synthetic construct
  REGION 1..9: note = Synthetic
MQRVEFPWT

SEQ ID NO: 2965 - protein, 122 aa, synthetic construct
  REGION 1..122: note = Synthetic
EVQLLESGGGLVQPGGSLRLSCAASGFTFSSYAMSWVRQAPGKGLEWVSGISGSGSSTYYADSVKGRFTISRDNSKNTLYLQMNSLRPEDTALYYCAKDSEIWSAPWAPDYWGQGTLVTVSS

SEQ ID NO: 2966 - protein, 15 aa, synthetic construct
  REGION 1..15: note = Synthetic
AKDSEIWSAPWAPDY

SEQ ID NO: 2967 - protein, 107 aa, synthetic construct
  REGION 1..107: note = Synthetic
DIQMTQSPXTLSASVGDRVTITCRASQGIRNDLGWYQQKPGKAPKRLIYTAFRLQSGVPSRFSGSGSGTEFTLTISSLQPEDFATYYCLQYNSYPWTFGQGTKVEIK

SEQ ID NO: 2968 - protein, 9 aa, synthetic construct
  REGION 1..9: note = Synthetic
LQYNSYPWT

SEQ ID NO: 2969 - protein, 119 aa, synthetic construct
  REGION 1..119: note = Synthetic
EVQLLESGGGLVQPGGSLRLSCAASGFTFRSDAMNWVRQAPGKGLEWVAAISPSGSSIYYADSVKGRFTISRDNSKNTLYLQMNSLRVEDTAVYYCAKDPLGILFFDCWGQGTLVTVSS

SEQ ID NO: 2970 - protein, 12 aa, synthetic construct
  REGION 1..12: note = Synthetic
AKDPLGILFFDC

SEQ ID NO: 2971 - protein, 106 aa, synthetic construct
  REGION 1..106: note = Synthetic
DIQMTQSPSTLSASVGDRVTITCRASQSISGWLAWYQQKPGKAPKLLIYEASTLESGVPSRFSGSGSGTEFTLTISSLQPDDFATYYCQQYNTYSTFGQGTKVEIK

SEQ ID NO: 2972 - protein, 8 aa, synthetic construct
  REGION 1..8: note = Synthetic
QQYNTYST

SEQ ID NO: 2973 - protein, 126 aa, synthetic construct
  REGION 1..126: note = Synthetic
QVQLVQSGAEVKKPGASVKVSCKVSGYSLTELSIHWVRQAPGKGLEWMGGFDTEVGETLYAQKFQGRVTMTDDTSADTVYMELSSLRSEDTAVYYCATDIVGAKAYNYYYYGLDVWGQGTTVTVSS

SEQ ID NO: 2974 - protein, 19 aa, synthetic construct
  REGION 1..19: note = Synthetic
ATDIVGAKAYNYYYYGLDV

SEQ ID NO: 2975 - protein, 107 aa, synthetic construct
  REGION 1..107: note = Synthetic
EIVMTQSPVTLSVSPGERATLSCRASQSVRSNLAWYQQKPGQAPRLLIYGESTRATGIPARFSGSGSGTEFTLTISSLQSEDFAVYFCHQYNYWPWTFGQGTKVEIK

SEQ ID NO: 2976 - protein, 9 aa, synthetic construct
  REGION 1..9: note = Synthetic
HQYNYWPWT

SEQ ID NO: 2977 - protein, 114 aa, synthetic construct
  REGION 1..114: note = Synthetic
QVQLVESGGGVVQPGRSLRLSCAASGFTFSSYGMHWVRQAPGKGLEWVAVISYDGSNKYYADSVKGRFTISRDNSKNTLYLQMNSLRAEDTAVYYCARAEFTLFGQGTLVTVSS

SEQ ID NO: 2978 - skipped

SEQ ID NO: 2979 - protein, 109 aa, synthetic construct
  REGION 1..109: note = Synthetic
SYVLTQPPSVSMSPGQTARITCSGDALSKQYAYWYQQRPGQAPVRVIYKDSERPSGIPERFSGSSSGTTVTLTISGVQAEDEADYYCQSADSSGTPYWVFGGGTKLTVL

SEQ ID NO: 2980 - protein, 12 aa, synthetic construct
  REGION 1..12: note = Synthetic
QSADSSGTPYWV

SEQ ID NO: 2981 - protein, 121 aa, synthetic construct; identical to SEQ ID NO: 261
  REGION 1..121: note = Synthetic

SEQ ID NO: 2982 - protein, 14 aa, synthetic construct
  REGION 1..14: note = Synthetic
ARHRTGTPYDAFDI

SEQ ID NO: 2983 - protein, 107 aa, synthetic construct; identical to SEQ ID NO: 262
  REGION 1..107: note = Synthetic

SEQ ID NO: 2984 - protein, 9 aa, synthetic construct
  REGION 1..9: note = Synthetic
QQYENVEIT

SEQ ID NO: 2985 - protein, 118 aa, synthetic construct
  REGION 1..118: note = Synthetic
QVQLVQSGAEVKKPGASVKVSCKASGYTFTSYGISWVRQVPGQGLEWMGWINTYNSNTHYAQKLQGRVTMTTDTSTSTAYMELRSLRSDDTAVYYCARDHGELSFDYWGQGTLATVSS

SEQ ID NO: 2986 - protein, 11 aa, synthetic construct
  REGION 1..11: note = Synthetic
ARDHGELSFDY

SEQ ID NO: 2987 - protein, 109 aa, synthetic construct
  REGION 1..109: note = Synthetic
SYVLTQPPSVSVSPGQTARITCSGDALPKQYAYWYQQRPGQAPVLVIYKDNERPSGIPERFSGSSSGTTVTLTISGVQAEDEADYYCQSADNSGTPNWVFGGGTKLTVL

SEQ ID NO: 2988 - protein, 12 aa, synthetic construct
  REGION 1..12: note = Synthetic
QSADNSGTPNWV

SEQ ID NO: 2989 - protein, 128 aa, synthetic construct; identical to SEQ ID NO: 257
  REGION 1..128: note = Synthetic

SEQ ID NO: 2990 - protein, 21 aa, synthetic construct
  REGION 1..21: note = Synthetic
AAGVAVAGTKGDYYYYYGMDF

SEQ ID NO: 2991 - protein, 107 aa, synthetic construct; identical to SEQ ID NO: 258
  REGION 1..107: note = Synthetic

SEQ ID NO: 2992 - protein, 9 aa, synthetic construct
  REGION 1..9: note = Synthetic
QQYNSYPRT

SEQ ID NO: 2993 - protein, 126 aa, synthetic construct
  REGION 1..126: note = Synthetic
QVQLVESGGGVVQPGRSLRLSCAASGFTFNNYGMHWVRQAPGKGLEWLAIIWYDGSNKYYADSVKGRFTISRDNSKNTLSLQMNSLRAEDTAVYYCARDWAPIYYYDNSGHAFDIWGQGTMVTVSS

SEQ ID NO: 2994 - protein, 19 aa, synthetic construct
  REGION 1..19: note = Synthetic
ARDWAPIYYYDNSGHAFDI

SEQ ID NO: 2995 - protein, 109 aa, synthetic construct
  REGION 1..109: note = Synthetic
SYVLTQPPSVSVAPGKTATITCGGNNIGSKSVYWYQQKPGQAPVLVVNDDSDRPSGIPERISGSNSGNTATLTISRVEAGDEADYYCQVWDSSSDHPWVFGGGTKLTVL

SEQ ID NO: 2996 - protein, 12 aa, synthetic construct
  REGION 1..12: note = Synthetic
QVWDSSSDHPWV

SEQ ID NO: 2997 - protein, 130 aa, synthetic construct
  REGION 1..130: note = Synthetic
EVQLLESGGGLVQPGGSLRLSCAASGFTFSSYTMSWVRQAPGKGLEWVSAISGSGDTTYNADTADSVKGRFTISRDNSKNTLYLQMNSLRVEDTAVYYCAKVYIGGRYMIYRSLGAFDIWGQGTMVTVSS

SEQ ID NO: 2998 - protein, 20 aa, synthetic construct
  REGION 1..20: note = Synthetic
AKVYIGGRYMIYRSLGAFDI

SEQ ID NO: 2999 - protein, 107 aa, synthetic construct
  REGION 1..107: note = Synthetic
DIQMTQSPXXLSASVGDRVTITCRASQDISNSLAWYQQKPGKAPKLLLYAASRLITGVPSRFSGSGSGTVYTLTISSLQPEDFATYYCQQYYSTPWTFGQGTKVEIK

SEQ ID NO: 3000 - protein, 9 aa, synthetic construct
  REGION 1..9: note = Synthetic
QQYYSTPWT

SEQ ID NO: 3001 - protein, 123 aa, synthetic construct; identical to SEQ ID NO: 275
  REGION 1..123: note = Synthetic

SEQ ID NO: 3002 - protein, 15 aa, synthetic construct
  REGION 1..15: note = Synthetic
ARASLAAWDYGDFDH

SEQ ID NO: 3003 - protein, 107 aa, synthetic construct; identical to SEQ ID NO: 276
  REGION 1..107: note = Synthetic

SEQ ID NO: 3004 - protein, 9 aa, synthetic construct
  REGION 1..9: note = Synthetic
LQHNSYPLT

SEQ ID NO: 3005 - protein, 128 aa, synthetic construct
  REGION 1..128: note = Synthetic
QVQLVQSGAEVKKPGASVKVSCKVSGYTLTELSMHWVRQAPGKGLEWMGGFDPEDAETIYAQKFQGRVTMTEDTSTDTAYMELSSLRSEDTAVYYCATGSVITGTKSLYYYYYGLDVWGQGTTVTVSS

SEQ ID NO: 3006 - protein, 21 aa, synthetic construct
  REGION 1..21: note = Synthetic
ATGSVITGTKSLYYYYYGLDV

SEQ ID NO: 3007 - protein, 107 aa, synthetic construct
  REGION 1..107: note = Synthetic
DIQMTQSPVSLSASVGDRVTITCRASQDISNYLAWFQQKPGKAPKSLIYGASSLQSGVPSKFSGSGSGTDFTLTISSLQPEDLATYYCQQYKSYPRTFGQGTKVEIK

SEQ ID NO: 3008 - protein, 9 aa, synthetic construct
  REGION 1..9: note = Synthetic
QQYKSYPRT

SEQ ID NO: 3009 - protein, 118 aa, synthetic construct; identical to SEQ ID NO: 269
  REGION 1..118: note = Synthetic

SEQ ID NO: 3010 - protein, 11 aa, synthetic construct
  REGION 1..11: note = Synthetic
ARDGFRGVLDY

SEQ ID NO: 3011 - protein, 110 aa, synthetic construct
  REGION 1..110: note = Synthetic
QSVLTQPASVSGSPGQSITISCTGTSSDVGSYNLVSWYQQYPGKAPKLMIYEGSKRPSGVSNRFSGSKSGNTASLTISGLQAEDEADYYCCSYAGSSTYVFGTGTKVTVL

SEQ ID NO: 3012 - protein, 10 aa, synthetic construct
  REGION 1..10: note = Synthetic
CSYAGSSTYV

SEQ ID NO: 3013 - protein, 124 aa, synthetic construct
  REGION 1..124: note = Synthetic
QVQLVESGGGVVQPGRSLRLSCAASGFTFSSYAMHWVRQAPGKGLEWVAVISYDGSNKYYADSVKGRFTISRDNSKNTLYLQMNSLRTEDTAVYYCAGSGSEGGYYSYYGMDVWGQGTTVTVSS

SEQ ID NO: 3014 - protein, 17 aa, synthetic construct
  REGION 1..17: note = Synthetic
AGSGSEGGYYSYYGMDV

SEQ ID NO: 3015 - protein, 108 aa, synthetic construct
  REGION 1..108: note = Synthetic
SYVLTQPPSVSVSPGQTARITCSGDALPKQYAYWYQQKPGQAPVLVIYKDSERPSGIPERFSGSSSGTTVTLTISGVQAEDEANYYCQSADSSGTYEVFGGGTKLTVL

SEQ ID NO: 3016 - protein, 11 aa, synthetic construct
  REGION 1..11: note = Synthetic
QSADSSGTYEV

SEQ ID NO: 3017 - protein, 128 aa, synthetic construct
  REGION 1..128: note = Synthetic
EVQLVESGGGLVKPGGSLRLSCAASGFTFSSYSMNWVRQAPGKGLEWVSSISSSSLFIYYADSVKGRFTISRDNAKNSLYLQMNSLRAEDTAVYYCARKEEERYFDTYYYYYYGMDVWGQGTTVTVSS

SEQ ID NO: 3018 - protein, 21 aa, synthetic construct
  REGION 1..21: note = Synthetic
ARKEEERYFDTYYYYYYGMDV

SEQ ID NO: 3019 - protein, 107 aa, synthetic construct
  REGION 1..107: note = Synthetic
DIQMTQSPSSLSASVGDRVTITCRASQSISRYLNWYQQKAGKAPKLLIYXASSLQSGVPSRFRGSGSGTAFTITISSLQPEDFATYYRQQSYSTLWTFGQGTKVEIK

SEQ ID NO: 3020 - protein, 9 aa, synthetic construct
  REGION 1..9: note = Synthetic
QQSYSTLWT

SEQ ID NO: 3021 - protein, 121 aa, synthetic construct
  REGION 1..121: note = Synthetic
EVQLLESGGGLVQPGGSLRLSCAASGFTFSSYAMSWVRQAPGKGLEWVSFISGSGGTTYYADSVKGRFTISRDNSKNTLYLQMNSLRAEDSAVYYCAKEGSTLTPYYFHYWGQGTLVTVSS

SEQ ID NO: 3022 - protein, 14 aa, synthetic construct
  REGION 1..14: note = Synthetic
AKEGSTLTPYYFHY

SEQ ID NO: 3023 - protein, 110 aa, synthetic construct
  REGION 1..110: note = Synthetic
QSVLTQPPSASGTPGQRVTISCSGSSSNIGSNTVSWYQQLPGTAPKLLIYSNDQRPSGVPDRFSGSKSGTSASLAISGLQSEDEADYYCATWDDSLNGWVFGGGTKLTVL

SEQ ID NO: 3024 - protein, 11 aa, synthetic construct
  REGION 1..11: note = Synthetic
ATWDDSLNGWV

SEQ ID NO: 3025 - protein, 121 aa, synthetic construct
  REGION 1..121: note = Synthetic
QVQLVQSGAEVKKPGASVKVSCKVSGYTLIELSMHWVRQAPGKGLEWMGGFDPEDVETIYAQKFQGRVTMTEDTSTDTAYMELSSLRSDDTAVYYCATHYAVAGRRLVDFWGQGTLVTVSS

SEQ ID NO: 3026 - protein, 14 aa, synthetic construct
  REGION 1..14: note = Synthetic
ATHYAVAGRRLVDF

SEQ ID NO: 3027 - protein, 110 aa, synthetic construct
  REGION 1..110: note = Synthetic
QSVLTQPPSVSAAPGQKVTISCSGSSSNIGDNYVSWYQQLPGTAPKLLIYENNKRPSGIPDRFSGSKSGTSATLGITGLQTGDEADYYCGTWDSSLSGGVFGGGTKLTVL

SEQ ID NO: 3028 - protein, 11 aa, synthetic construct
  REGION 1..11: note = Synthetic
GTWDSSLSGGV

SEQ ID NO: 3029 - protein, 124 aa, synthetic construct
  REGION 1..124: note = Synthetic
QVQLQESGPGLVKPSETLSLTCGVSGGSISTDHWNWIRQPPGKGLEWIGYIYNSGSTNYNPSLKSRVTISVDTSKNQFSLKLSSVTAADTAVYYCARVSSYSWNPEDYYGMDVWGQGTSVTVSS

SEQ ID NO: 3030 - protein, 18 aa, synthetic construct
  REGION 1..18: note = Synthetic
ARVSSYSWNPEDYYGMDV

SEQ ID NO: 3031 - protein, 108 aa, synthetic construct
  REGION 1..108: note = Synthetic
SYVLTQPPSVSVSPGQTARITCSGDALPKQYAYWYQQKPGQAPVLVIYKDSERPSGIPERFSGSSSGTTVTLTISGVQAEDEADYFCQSADSSVTYWVFGGGTKLTVL

SEQ ID NO: 3032 - protein, 11 aa, synthetic construct
  REGION 1..11: note = Synthetic
QSADSSVTYWV

SEQ ID NO: 3033 - protein, 125 aa, synthetic construct
  REGION 1..125: note = Synthetic
QVQLVESGGGVVQPGRSLRLSCAASGFTFSSYAMHWVRQAPGKGLEWVAVISYDGSNKDYADSVKGRFTISRDNSKRTLYLQMNSLRTEDTALYYCARDPPIWLEGYYYHGMDVWGQGTTVTVSS

SEQ ID NO: 3034 - protein, 18 aa, synthetic construct
  REGION 1..18: note = Synthetic
ARDPPIWLEGYYYHGMDV

SEQ ID NO: 3035 - protein, 113 aa, synthetic construct
  REGION 1..113: note = Synthetic
QSVLTQPSSLSASPGASASLTCTLRSDINVGTYRIYWYQQKPGSPPQFLLRYKSDSDYQKGSGVPSRFSGSKNTSANAGILLISGLQSEDEADYYCMIWHGSVVVFGGGTKLT

SEQ ID NO: 3036 - protein, 9 aa, synthetic construct
  REGION 1..9: note = Synthetic
MIWHGSVVV

SEQ ID NO: 3037 - protein, 123 aa, synthetic construct
  REGION 1..123: note = Synthetic
EVQLVESGGGLVQPGGSLRLSCAASGFTFSSYEMSWVRQAPGKGLEWVSSISRSASTIYYADSVKGRFTISRDNAKNSLYLQMNSLRAEDTAVYYCARGVAMLEVGYNWFDPWGQGTLVTVSS

SEQ ID NO: 3038 - protein, 16 aa, synthetic construct
  REGION 1..16: note = Synthetic
ARGVAMLEVGYNWFDP

SEQ ID NO: 3039 - protein, 109 aa, synthetic construct
  REGION 1..109: note = Synthetic
SYVLTQPPSVSVAPGQTARITCGGHNIGSKTVHWYQQKPGQAPVLVVDDETDRPSGIPERFSGSNSGNTATLTISRVEAGDEADYYCQLWDTTSDHPWVFGGGTKLTVL

SEQ ID NO: 3040 - protein, 12 aa, synthetic construct
  REGION 1..12: note = Synthetic
QLWDTTSDHPWV

SEQ ID NO: 3041 - protein, 118 aa, synthetic construct; identical to SEQ ID NO: 289
  REGION 1..118: note = Synthetic

SEQ ID NO: 3042 - protein, 11 aa, synthetic construct
  REGION 1..11: note = Synthetic
ARGWGQLPLDY

SEQ ID NO: 3043 - protein, 110 aa, synthetic construct
  REGION 1..110: note = Synthetic
QSVLTQPASVSGSPGQSIIISCIGTSSDVGSYNLVSWYQQHPGKAPKLMIYEGSKRPSGVSNRFSGSKSGNTASLTISGLQAEDEADYYCYSYAGSSTWVFGGGTKLTVL

SEQ ID NO: 3044 - protein, 10 aa, synthetic construct
  REGION 1..10: note = Synthetic
YSYAGSSTWV

SEQ ID NO: 3045 - protein, 128 aa, synthetic construct
  REGION 1..128: note = Synthetic
QVQLVQSGAEVKKPGASVKVSCKVSGYTLTEVSMHWVRQAPGKGLEWMGGFDPEDAETIYAQKFQGRVTMTEDTSTDTAYMELSSLRSEDTAVYYCATAPAVAGTRMRYYYYYGMDVWGQGTTVTVSS

SEQ ID NO: 3046 - protein, 21 aa, synthetic construct
  REGION 1..21: note = Synthetic
ATAPAVAGTRMRYYYYYGMDV

SEQ ID NO: 3047 - protein, 112 aa, synthetic construct
  REGION 1..112: note = Synthetic
DIVMTQTPLSSPVTLGQPASISCRSSQSLVHSDGNTYLSWLQQRPGQPPRLLIYKISNRFSGVPDRFSGSGAGTDFTLKISRVEAEDVGVYYCMQTTQFPRTFGQGTKLEIK

SEQ ID NO: 3048 - protein, 9 aa, synthetic construct
  REGION 1..9: note = Synthetic
MQTTQFPRT

SEQ ID NO: 3049 - protein, 124 aa, synthetic construct; identical to SEQ ID NO: 265
  REGION 1..124: note = Synthetic

SEQ ID NO: 3050 - protein, 15 aa, synthetic construct
  REGION 1..15: note = Synthetic
TTETSGYLEAVAFDI

SEQ ID NO: 3051 - protein, 105 aa, synthetic construct
  REGION 1..105: note = Synthetic
SYVLTQPPSVSVAPGKTARITCGGNNIGSKSVHWYQQKPGQAPVLVVYDDSDRPSGIPERFSGSNSGNTATLTISRVEAGDEADYYCQVWDNCGVFGGGTQADRP

SEQ ID NO: 3052 - protein, 8 aa, synthetic construct
  REGION 1..8: note = Synthetic
QVWDNCGV

SEQ ID NO: 3053 - protein, 120 aa, synthetic construct
  REGION 1..120: note = Synthetic
QLQLQESGSGLVKPSQTLSLTCAVSGGSISSGGYSWSWIRQPPGKGLEWIGSIYHSGSTYYNPSLKSRVTISVDRSKNQFSLKVSSVTAADTAVYYCARGPVGTTCFDYWGQGTLVTVSS

SEQ ID NO: 3054 - protein, 12 aa, synthetic construct
  REGION 1..12: note = Synthetic
ARGPVGTTCFDY

SEQ ID NO: 3055 - protein, 110 aa, synthetic construct
  REGION 1..110: note = Synthetic
QSVLTQEPSFSVSPGGTVTLTCGLSSGSVSTSYFPSWYQQTPGQAPRTLIYNTNTRSSGVPDRFSGSILGNKAALTVTGAQADDESDYYCVLYMGDGIWVFGGGTKLTVL

SEQ ID NO: 3056 - protein, 10 aa, synthetic construct
  REGION 1..10: note = Synthetic
VLYMGDGIWV

SEQ ID NO: 3057 - protein, 118 aa, synthetic construct; identical to SEQ ID NO: 281
  REGION 1..118: note = Synthetic

SEQ ID NO: 3058 - protein, 11 aa, synthetic construct
  REGION 1..11: note = Synthetic
AKDLGSYYGGY

SEQ ID NO: 3059 - protein, 108 aa, synthetic construct; identical to SEQ ID NO: 282
  REGION 1..108: note = Synthetic

SEQ ID NO: 3060 - protein, 10 aa, synthetic construct
  REGION 1..10: note = Synthetic
LQYNSYPRVT

SEQ ID NO: 3061 - protein, 121 aa, synthetic construct
  REGION 1..121: note = Synthetic
EVQLLESGGGLVQPGGSLRLSCAASGFTFSSYAMSWVRQAPGKGLEWVSAISGSGGSTYYADSVKGRFTISRDNSKNTLYLQMNSLRAEDTAVYYCAKDRYGLGYNWFDPWGQGTVVTVSS

SEQ ID NO: 3062 - protein, 14 aa, synthetic construct
  REGION 1..14: note = Synthetic
AKDRYGLGYNWFDP

SEQ ID NO: 3063 - protein, 107 aa, synthetic construct
  REGION 1..107: note = Synthetic
EIVMTQSPATLSVSPGERATLSCRASQSVSSNLAWYQQKPGQAPRLLIYGASTRATGIPARFSGSGSGTEFTLTISSLQSEDFAVYYCQQYNNWPITFGQGTRLEIK

SEQ ID NO: 3064 - protein, 9 aa, synthetic construct
  REGION 1..9: note = Synthetic
QQYNNWPIT

SEQ ID NO: 3065 - protein, 123 aa, synthetic construct
  REGION 1..123: note = Synthetic
QVQLVQSGAEVKKPGASVKVSCKASGYTFTSYGICWVRQAPGQGLEWMGWISAYNGNTNYAQKFQGRVTMTTDTSTSTAYMELRSLRSDDTAVYYCARSPSVLVWLDLTFDIWGQGTMVTVSS

SEQ ID NO: 3066 - protein, 16 aa, synthetic construct
  REGION 1..16: note = Synthetic
ARSPSVLVWLDLTFDI

SEQ ID NO: 3067 - protein, 108 aa, synthetic construct
  REGION 1..108: note = Synthetic
DIQMTQSPSSLSASVGDRVTITCQASQDISNYLNWYQQKAGKAPKLLIYDASNLKAGVPSRFSGSGSGTDFTFTISSLQPEDIAAYFRQQYDNLPPITFGQGTRLEIK

SEQ ID NO: 3068 - protein, 10 aa, synthetic construct
  REGION 1..10: note = Synthetic
QQYDNLPPIT

SEQ ID NO: 3069 - protein, 127 aa, synthetic construct
  REGION 1..127: note = Synthetic
QVQLQESGPGLVKPSQTLSLTCTVSGGSFSSGGYYWNWIRQHPGKGLEWIGYIYYSGSTYYNPSLKSRVAMSVDTSKNQFSLKLTSVTAADTAVYYCARGEAICSGYSCYTEALDIWGQGTMVTVSS

SEQ ID NO: 3070 - protein, 19 aa, synthetic construct
  REGION 1..19: note = Synthetic
ARGEAICSGYSCYTEALDI

SEQ ID NO: 3071 - protein, 113 aa, synthetic construct
  REGION 1..113: note = Synthetic
DIVMTQTPLSLPVTPGEPASISCRSSQSLLDSDDGNTYLDWYLQKPGQSPQLLIYTLSYRASGVPDRFSGSGSGTDFTLKISRVEAEDVGVYYCMQRIEFPRTFGQGTKVEIK

SEQ ID NO: 3072 - protein, 9 aa, synthetic construct
  REGION 1..9: note = Synthetic
MQRIEFPRT

SEQ ID NO: 3073 - protein, 122 aa, synthetic construct; identical to SEQ ID NO: 271
  REGION 1..122: note = Synthetic

SEQ ID NO: 3074 - protein, 15 aa, synthetic construct
  REGION 1..15: note = Synthetic
ARGYDILTGYLALDY

SEQ ID NO: 3075 - protein, 108 aa, synthetic construct; identical to SEQ ID NO: 272
  REGION 1..108: note = Synthetic

SEQ ID NO: 3076 - protein, 10 aa, synthetic construct
  REGION 1..10: note = Synthetic
QQYNNWPPYS

SEQ ID NO: 3077 - protein, 129 aa, synthetic construct
  REGION 1..129: note = Synthetic
EVQLVESGGGLVKPGGSLRLSCAASGFTFSSYTMNWVRQAPGKGLEWVSSISSSSSFIYYADSVRGRITVSRDNAKNSLFLQMNSLRAEDTALYYCARTLRDGDYDFWRGYYPNAFDIWGQGTMVIVSS

SEQ ID NO: 3078 - protein, 22 aa, synthetic construct
  REGION 1..22: note = Synthetic
ARTLRDGDYDFWRGYYPNAFDI

SEQ ID NO: 3079 - protein, 108 aa, synthetic construct; identical to SEQ ID NO: 284
  REGION 1..108: note = Synthetic

SEQ ID NO: 3080 - protein, 10 aa, synthetic construct
  REGION 1..10: note = Synthetic
QQYYNWPPWT

SEQ ID NO: 3081 - protein, 125 aa, synthetic construct
  REGION 1..125: note = Synthetic
EVQLVESGGGLVKPGGSLRLSCAASGFTFSSYSMNWVRQAPGKGLEWVSSISSSSNYIYHADSVKGRFTISRDNAKNSVYLQMNSLRAEDTAVYYCARMRYFHSSGYYPDAFDIWGQGTMVTVSS

SEQ ID NO: 3082 - protein, 18 aa, synthetic construct
  REGION 1..18: note = Synthetic
ARMRYFHSSGYYPDAFDI

SEQ ID NO: 3083 - protein, 108 aa, synthetic construct
  REGION 1..108: note = Synthetic
EIVMTQSPATLSVSPGERAALSCRASQSVSSNLAWYQQKPGQAPRLLIFGASTRATGIPARFSGSGSGTEFTLTISSLQSEDFAVYYCQQYYNWPPWTFGQGTKVEIK

SEQ ID NO: 3084 - protein, 10 aa, synthetic construct
  REGION 1..10: note = Synthetic
QQYYNWPPWT

SEQ ID NO: 3085 - protein, 128 aa, synthetic construct
  REGION 1..128: note = Synthetic
QVQLVQSGAEVKKPGASVKVSCKVSGYTLTEVSMHWVRQAPGKGLEWMGGFDPEDAETIYAQKFQDRVTMTEDTSTDTAYMDLSSLRSDDTAVYYCAAGVAVAGTKEDYYYYYGMDVWGQGTTVTVSS

SEQ ID NO: 3086 - protein, 21 aa, synthetic construct
  REGION 1..21: note = Synthetic
AAGVAVAGTKEDYYYYYGMDV

SEQ ID NO: 3087 - protein, 107 aa, synthetic construct
  REGION 1..107: note = Synthetic
DIQMTQSPSSLSASVGDRVTITCRASQDISSSVVWFQQKPGKAPKSLIYAASSLQSGVPSKFSGSGSGTDFTLTISSLQPEDFATYYCQQYNSYPRTFGQGTKVEFK

SEQ ID NO: 3088 - protein, 9 aa, synthetic construct
  REGION 1..9: note = Synthetic
QQYNSYPRT

SEQ ID NO: 3089 - protein, 122 aa, synthetic construct; identical to SEQ ID NO: 267
  REGION 1..122: note = Synthetic

SEQ ID NO: 3090 - protein, 15 aa, synthetic construct
  REGION 1..15: note = Synthetic
ARDHGYSGSRSPLGY

SEQ ID NO: 3091 - protein, 107 aa, synthetic construct; identical to SEQ ID NO: 268
  REGION 1..107: note = Synthetic

SEQ ID NO: 3092 - protein, 9 aa, synthetic construct
  REGION 1..9: note = Synthetic
QQSYSTPGT

SEQ ID NO: 3093 - protein, 123 aa, synthetic construct; identical to SEQ ID NO: 259
  REGION 1..123: note = Synthetic

SEQ ID NO: 3094 - protein, 15 aa, synthetic construct
  REGION 1..15: note = Synthetic
ATYFRGYTVDEGFDP

SEQ ID NO: 3095 - protein, 107 aa, synthetic construct; identical to SEQ ID NO: 260
  REGION 1..107: note = Synthetic

SEQ ID NO: 3096 - protein, 9 aa, synthetic construct
  REGION 1..9: note = Synthetic
LQYNSYPLT

SEQ ID NO: 3097 - protein, 118 aa, synthetic construct; identical to SEQ ID NO: 287
  REGION 1..118: note = Synthetic

SEQ ID NO: 3098 - protein, 12 aa, synthetic construct
  REGION 1..12: note = Synthetic
ARIVPRRWWFDP

SEQ ID NO: 3099 - protein, 112 aa, synthetic construct
  REGION 1..112: note = Synthetic
QSVLTQPASVSGSPGQSITISCTGTSSDVGSYNLVSWYQQHPGKAPKLMIYEGSKRPSGVSNRFSGSKSGNTASLTISGLQAEDEADYYCCSYAGSSTLDVVFGGGTKLTVL

SEQ ID NO: 3100 - protein, 12 aa, synthetic construct
  REGION 1..12: note = Synthetic
CSYAGSSTLDVV

SEQ ID NO: 3101 - protein, 126 aa, synthetic construct
  REGION 1..126: note = Synthetic
QVQLQESGPGLVKPSETLSLTCTVSGGSISSYYWSWIRQPPGKGLEWIGYIYYSGSTNYNPSLNSRVTISIDTSKNQFSVKLSAVTAADTAVYYCARGSPYENSSGYFQSWYFDLWGRGTLVTVSS

SEQ ID NO: 3102 - protein, 20 aa, synthetic construct
  REGION 1..20: note = Synthetic
ARGSPYENSSGYFQSWYFDL

SEQ ID NO: 3103 - protein, 107 aa, synthetic construct
  REGION 1..107: note = Synthetic
SYVLTQPPSVSVSPGQTASITCSGDKLDYKYASWYQQKPGQSPVLVIYQDTKRPSGIPERFSGSNSGNTATLTISGTQAMDEADYYCQAWDISTDVVFGGGTKLTVL

SEQ ID NO: 3104 - protein, 10 aa, synthetic construct
  REGION 1..10: note = Synthetic
QAWDISTDVV

SEQ ID NO: 3105 - protein, 133 aa, synthetic construct
  REGION 1..133: note = Synthetic
QVQLVQSGAEVKKPGASVKVSCKVSGYTLIELSMHWVRQAPGKGLEWMGGFDPEDAETIYAQKFQGRVTMTEDTSTDTAYMELSSLRSEDTAVYYCATAPAAMVTLSPEGTTQHFYYYGLDVWGQGTTVTVSS

SEQ ID NO: 3106 - protein, 26 aa, synthetic construct
  REGION 1..26: note = Synthetic
ATAPAAMVTLSPEGTTQHFYYYGLDV

SEQ ID NO: 3107 - protein, 112 aa, synthetic construct
  REGION 1..112: note = Synthetic
DIVMTQTPLSSPVTLXQPASISCRSSQSLVHSDGNTYLSWLQQRPGQPPRLLIYKISNRFSGVPDRFSGSGAGTDFTLKISRVEAEDVGVYYCMQVTQFPFTFGGGTKVEIK

SEQ ID NO: 3108 - protein, 9 aa, synthetic construct
  REGION 1..9: note = Synthetic
MQVTQFPFT

SEQ ID NO: 3109 - protein, 117 aa, synthetic construct
  REGION 1..117: note = Synthetic
QVQLVESGGGVVQPGRSLRLSCAASGFMFSSYAMNWVRQAPGKGLEWVAGISYDGSNKYYADSVKGRFTISRDNSKNTLYLQMNSLRVEDTAVYYCARDLGGYFDFWGQGTLVTVSS

SEQ ID NO: 3110 - protein, 10 aa, synthetic construct
  REGION 1..10: note = Synthetic
ARDLGGYFDF

SEQ ID NO: 3111 - protein, 106 aa, synthetic construct
  REGION 1..106: note = Synthetic
SYVLTQPPSVSVSPGQTARITCSGDALPKQYAYWYQQKPGQAPVLVIYKDSERPSGIPERFSGSSSGTTVTLTISGVQAEDEADYYCQSAESSGPVFGGGTKLTVL

SEQ ID NO: 3112 - protein, 9 aa, synthetic construct
  REGION 1..9: note = Synthetic
QSAESSGPV

SEQ ID NO: 3113 - protein, 130 aa, synthetic construct; identical to SEQ ID NO: 291
  REGION 1..130: note = Synthetic

SEQ ID NO: 3114 - protein, 22 aa, synthetic construct
  REGION 1..22: note = Synthetic
ARHGPPIWYYYDSSGYPDAFDI

SEQ ID NO: 3115 - protein, 113 aa, synthetic construct
  REGION 1..113: note = Synthetic
DIVMTQSPXXLAVSLGERATINCKSSQSVLYSSNNKNYLAWYQQKPGQPPKLLIYWASTRESGVPDRFSGSGSGTDFTLTISSLQAEDVAVYYCQQYYSTPYTFGQGTKLEIK

SEQ ID NO: 3116 - protein, 9 aa, synthetic construct
  REGION 1..9: note = Synthetic
QQYYSTPYT

SEQ ID NO: 3117 - protein, 125 aa, synthetic construct
  REGION 1..125: note = Synthetic
EVQLLESGGGLVQPGGSLRLSCAASGFTFSSYAMSWVRQAPGQGLEWVSAISGSGGSTYYADSVKGRFTLSRDNSKNTLSLQMNSLRAEDTAVYYCSKTFCSGATCYPGYYFDYWGQGTLVTVSS

SEQ ID NO: 3118 - protein, 18 aa, synthetic construct
  REGION 1..18: note = Synthetic
SKTFCSGATCYPGYYFDY

SEQ ID NO: 3119 - protein, 105 aa, synthetic construct
  REGION 1..105: note = Synthetic
EIVLTQSPATLSLSPGERATLSCRASQSVSSYLAWYQQKPGQVPRLLIYDASNRATGIPARFSGSGSGTDFTLTISSLEPEDFAVYYCQQPLKLTFGGGTKVEIK

SEQ ID NO: 3120 - protein, 7 aa, synthetic construct
  REGION 1..7: note = Synthetic
QQPLKLT

SEQ ID NO: 3121 - protein, 127 aa, synthetic construct
  REGION 1..127: note = Synthetic
EVQLVQSGAEVKKPGESLRISCKGSGYSFTSYWISWVRQMPGKGLEWMGRIDPSDSYTNYSPSFQGHVTISTDKSISTAYLQWSSLKASDTAMYYCAVQDYFDSREQHSYYYGMEVWGQGTTVTVSS

SEQ ID NO: 3122 - protein, 20 aa, synthetic construct
  REGION 1..20: note = Synthetic
AVQDYFDSREQHSYYYGMEV

SEQ ID NO: 3123 - protein, 112 aa, synthetic construct
  REGION 1..112: note = Synthetic
DIVMTQSPXXLPVTPGEPASISCRSSQSLLHSNGYNYLDWYLQKPGQSPQLLIYLGSNRASGVPDRFSGSGSGTDFTLKISRVEAEDVGVYYCMQALQTPQTFGQGTKVEIK

SEQ ID NO: 3124 - protein, 9 aa, synthetic construct
  REGION 1..9: note = Synthetic
MQALQTPQT

SEQ ID NO: 3125 - protein, 120 aa, synthetic construct
  REGION 1..120: note = Synthetic
QVQLQQWGAGLLKPSETLSLTCAVYGGSFSGYYWSWIRQPPGKGLEWIGEINHSGSTNYNPSLKSRVTISVDTSKNQFSLKLSSVTAADTAVYYCARGVAMAEYNWFDPWGQGTLVTVSS

SEQ ID NO: 3126 - protein, 14 aa, synthetic construct
  REGION 1..14: note = Synthetic
ARGVAMAEYNWFDP

SEQ ID NO: 3127 - protein, 107 aa, synthetic construct
  REGION 1..107: note = Synthetic
DIQMTQSPSSLSASVGDRVTITCRASQGISNYLAWYQQKPGKVPKLLIYAASTLQSGVPSRFSGSESGTDFTLTISSLQPEDVATYYCQKYNSPPQTFGQGTKVEIK

SEQ ID NO: 3128 - protein, 9 aa, synthetic construct
  REGION 1..9: note = Synthetic
QKYNSPPQT

SEQ ID NO: 3129 - protein, 131 aa, synthetic construct
  REGION 1..131: note = Synthetic
QVQLVQSGAEVKKPGSSVKVSCKASGGTFSIYAITWVRQAPGQGLEWMGGIIPIFGTTNYAQKFQGRVTITADESTSTAYMELTSLRSEDTAVYFCASDGLVDCSGGSCYSDYSHYGMDVWGQGTTVTVSS

SEQ ID NO: 3130 - protein, 24 aa, synthetic construct
  REGION 1..24: note = Synthetic
ASDGLVDCSGGSCYSDYSHYGMDV

SEQ ID NO: 3131 - protein, 107 aa, synthetic construct
  REGION 1..107: note = Synthetic
DIQMTQSPSSLSASVGDRVTITCRASQSISSYLNWYQQKSGKAPKLLIYGASSLQSGVPSRFSGSGFGTDFTLSLSSLQPEDFATYYCQQSYSTPRTFGQGTRLEIK

SEQ ID NO: 3132 - protein, 9 aa, synthetic construct
  REGION 1..9: note = Synthetic
QQSYSTPRT

SEQ ID NO: 3133 - protein, 122 aa, synthetic construct
  REGION 1..122: note = Synthetic
EVQLVQSGAEVKKPGESLRISCKGSGYSFTTYWISWVRQMPGKGLEWMGRIDPSDSYTNYSPSFQGHVTISADKSITTAYLQWSSLKASDTAMYYCARAVAGPGEYNWFDPWGQGTLVTVSS

SEQ ID NO: 3134 - protein, 15 aa, synthetic construct
  REGION 1..15: note = Synthetic
ARAVAGPGEYNWFDP

SEQ ID NO: 3135 - protein, 109 aa, synthetic construct
  REGION 1..109: note = Synthetic
SYVLTQPPSVSVAPGQTARITCGGKNIGSKSVHWYQQKPGQAPVLVVDDDSDRPSGIPERFSGFNSGNTATLTISRVEAGDEADYYCQVWDRSSDLFYVFGTGTKVTVL

SEQ ID NO: 3136 - protein, 12 aa, synthetic construct
  REGION 1..12: note = Synthetic
QVWDRSSDLFYV

SEQ ID NO: 3137 - protein, 128 aa, synthetic construct
  REGION 1..128: note = Synthetic
EVQLVESGGGLVKPGGSLRLSCAASGFTFSSFGMNWVRQAPGKGLEWVSSISSSSSYIYYVDSVKGRFTISRDNAKNSLYLQMNSLRAEDTAVYYCARDNLGDYSKFSGYYYYGMDVWGQGTTVTVSS

SEQ ID NO: 3138 - protein, 21 aa, synthetic construct
  REGION 1..21: note = Synthetic
ARDNLGDYSKFSGYYYYGMDV

SEQ ID NO: 3139 - protein, 108 aa, synthetic construct; identical to SEQ ID NO: 18
  REGION 1..108: note = Synthetic

SEQ ID NO: 3140 - protein, 10 aa, synthetic construct [sequence omitted]

SEQ ID NO: 3141 - protein, 124 aa, synthetic construct
  REGION 1..124: note = Synthetic
QVQLVQSGAEVKKPGASVKVSCKASGHTFTTYGISWVRQAPGQGLEWMGWISAYNGNTNYAQKLQGRVTMTTDTSTSTAYMELRSLRSDDTAVYYCATHAGKGPENYYYGMDVWGQGTTVTVSS

SEQ ID NO: 3142 - protein, 17 aa, synthetic construct
  REGION 1..17: note = Synthetic
ATHAGKGPENYYYGMDV

SEQ ID NO: 3143 - protein, 108 aa, synthetic construct
  REGION 1..108: note = Synthetic
SYVLTQPPSVSVSPGQTARITCSGDALPKQYAYWYQQKPGQAPVMVIYKDNERPSGIPERFSGSSSGTTVTLTISGVQAEDEADYYCQSADSSGTFVVFGGGTKMTVL

SEQ ID NO: 3144 - protein, 11 aa, synthetic construct
  REGION 1..11: note = Synthetic
QSADSSGTFVV

SEQ ID NO: 3145 - protein, 125 aa, synthetic construct
  REGION 1..125: note = Synthetic
QVQLVQSGAEVKKPGASVKVSCKVSGYTLIELSMHWVRQAPGKGLEWMGGFDPEDVETIYAQKFQGRVTMTEDTSTDTAYMELSSLRSEDTAVYYCATSSPHCSGGSCLSWFDPWGQGTLVTVSS

SEQ ID NO: 3146 - protein, 18 aa, synthetic construct
  REGION 1..18: note = Synthetic
ATSSPHCSGGSCLSWFDP

SEQ ID NO: 3147 - protein, 110 aa, synthetic construct
  REGION 1..110: note = Synthetic
QSVLTQPASVSGSPGQSITLSCTGTSSDVGTYNYVSWYQQHPGKAPKLMIYDVSNRPSGVSNRFSGSKSGNTASLTISGLQAEDEADYYCSSYTSSSTLVFGGGTKLTVI

SEQ ID NO: 3148 - protein, 10 aa, synthetic construct
  REGION 1..10: note = Synthetic
SSYTSSSTLV

SEQ ID NO: 3149 - protein, 129 aa, synthetic construct; identical to SEQ ID NO: 279
  REGION 1..129: note = Synthetic

SEQ ID NO: 3150 - protein, 22 aa, synthetic construct
  REGION 1..22: note = Synthetic
ARTAPQVQLRSRIPSLNWYFDL

SEQ ID NO: 3151 - protein, 107 aa, synthetic construct; identical to SEQ ID NO: 280
  REGION 1..107: note = Synthetic

SEQ ID NO: 3152 - protein, 9 aa, synthetic construct
  REGION 1..9: note = Synthetic
QQYNSYPGT

SEQ ID NO: 3153 - protein, 121 aa, synthetic construct; identical to SEQ ID NO: 255
  REGION 1..121: note = Synthetic

SEQ ID NO: 3154 - protein, 14 aa, synthetic construct
  REGION 1..14: note = Synthetic
ATHYAAAGRGLVDY

SEQ ID NO: 3155 - protein, 110 aa, synthetic construct; identical to SEQ ID NO: 256
  REGION 1..110: note = Synthetic

SEQ ID NO: 3156 - protein, 11 aa, synthetic construct
  REGION 1..11: note = Synthetic
GTWDSSLSAGV

SEQ ID NO: 3157 - protein, 117 aa, synthetic construct
  REGION 1..117: note = Synthetic
QVQLVESGGGVVQPGRSLRLSCAASGFTFSSYAIHWVRQAPGKGLEWVALISYDGSNKYYADSVKGRFTISRDNSKNTLYLQMNSLRPEDTAVYYCASTISVAPSPWGQGTLVTXSS

SEQ ID NO: 3158 - protein, 10 aa, synthetic construct
  REGION 1..10: note = Synthetic
ASTISVAPSP

SEQ ID NO: 3159 - protein, 107 aa, synthetic construct
  REGION 1..107: note = Synthetic
SYVLTQPPSVSVSPGQTARITCSGDALPKKYAYWYQQKSGQAPVLVIYEDSKRPSGIPERFSGSSSGTMATLTISGAQVEDEADYYCYSTDSSGNPLFGTGTQVTVL

SEQ ID NO: 3160 - protein, 10 aa, synthetic construct
  REGION 1..10: note = Synthetic
YSTDSSGNPL

SEQ ID NO: 3161 - protein, 124 aa, synthetic construct
  REGION 1..124: note = Synthetic
EVQLVESGGGLVKPGGSLRLSCAASGFTFSSYSMNWVRQAPGKGLEWVSFISTSSSYIYYADSVKGRFTISRDNAKNSLYLQMNSLRAEDTAVYYCARVGSGSYYWTDDAFDIWGQGTMVTVSS

SEQ ID NO: 3162 - protein, 17 aa, synthetic construct
  REGION 1..17: note = Synthetic
ARVGSGSYYWTDDAFDI

SEQ ID NO: 3163 - protein, 108 aa, synthetic construct
  REGION 1..108: note = Synthetic
SYVLTQPPSVSVSPGQTARITCSGDALPKQYAYWYQQKPGQAPVLLIYKDSERPSGIPERFSGSSSGTTVTLTISGVQAEDEADYYCQSADSSGTPFVFGTGTKVTVL

SEQ ID NO: 3164 - protein, 11 aa, synthetic construct
  REGION 1..11: note = Synthetic
QSADSSGTPFV

SEQ ID NO: 3165 - protein, 129 aa, synthetic construct
  REGION 1..129: note = Synthetic
QVQLQESGPGLVKPSETLSLTCTVSGGSVSSGSYYWSWIRQPPGKGLEWIGYIYYSGSTNYNPSLKSRVTISVDTSKNQFSLKLSSVTAADTAVYYCARGTFGDTVMVTVYYYYGMDVWGQGTTVTVSS

SEQ ID NO: 3166 - protein, 21 aa, synthetic construct
  REGION 1..21: note = Synthetic
ARGTFGDTVMVTVYYYYGMDV

SEQ ID NO: 3167 - protein, 108 aa, synthetic construct
  REGION 1..108: note = Synthetic
SYVLTQPPSVSVSPGQTARITCSGDALANQYAYWYQQKPGQAPVLVIYKDSERPSGIPERFSGSSSGTTVTLTISGVQAEDEADYSCQSADSSGTYMIFGGGTKLTVL

SEQ ID NO: 3168 - protein, 11 aa, synthetic construct
  REGION 1..11: note = Synthetic
QSADSSGTYMI

SEQ ID NO: 3169 - protein, 120 aa, synthetic construct
  REGION 1..120: note = Synthetic
QVQLVESGGGVVQPGRSLRLSCAASRFTFSSYALHWVRQAPGKGLEWVGLISYDGSNKYYPDSVKGRFTISRDNSKNTLYLQMNSLRAEDTAVYYCARAIAAVGGALDVWGQGTTVTVSS

SEQ ID NO: 3170 - protein, 13 aa, synthetic construct
  REGION 1..13: note = Synthetic
ARAIAAVGGALDV

SEQ ID NO: 3171 - protein, 106 aa, synthetic construct
  REGION 1..106: note = Synthetic
SYVLTQPPSESVSPGQTASISCSGEKLGDKYACWYQQKPGQSPVLVMYQDSKRPSGIPERFSGSNSGNTATLTISGTQAMDEADYYCQAWDSSTAVFGGGTKLTVL

SEQ ID NO: 3172 - protein, 9 aa, synthetic construct
  REGION 1..9: note = Synthetic
QAWDSSTAV

SEQ ID NO: 3173 - protein, 125 aa, synthetic construct
  REGION 1..125: note = Synthetic
QVQLQQWGAGLLKPSETLSLTCAVSGGSFSPYYWSWIRQPPGKGLEWIGEINHSGSTKYNPSLKSRVTISADTSKNQFSLKLSSVTAADTAVYYCARGVVVVVAGTLMVPWFDPWGHGSLVTVSS

SEQ ID NO: 3174 - protein, 19 aa, synthetic construct
  REGION 1..19: note = Synthetic
ARGVVVVVAGTLMVPWFDP

SEQ ID NO: 3175 - protein, 111 aa, synthetic construct
  REGION 1..111: note = Synthetic
QSVLTQPASVSGSPGQSITISCTGTSSDVGSYNLVSWYQQHPGKAPKLMIYEGSKRPSGVSNRFSGSKSGNTASLTISGLQAEDEADYYCCSYAGSSTGYVFVTGTKVTVL

SEQ ID NO: 3176 - protein, 11 aa, synthetic construct
  REGION 1..11: note = Synthetic
CSYAGSSTGYV

SEQ ID NO: 3177 - protein, 129 aa, synthetic construct
  REGION 1..129: note = Synthetic
QVQLVESGGGVVQPGRSLRLSCAASGFTFSSSGMHWVRQAPGKGLEWVAVISHDGTNKFYADSVKGRFTISRDNSKNTLYLQMNSLRAEDTAVYYCARDFPQQLDSRREVTVAGGLDYWGQGTLVTVSS

SEQ ID NO: 3178 - protein, 22 aa, synthetic construct
  REGION 1..22: note = Synthetic
ARDFPQQLDSRREVTVAGGLDY

SEQ ID NO: 3179 - protein, 109 aa, synthetic construct
  REGION 1..109: note = Synthetic
SYVLTQPPSVSVSPGQTARITCSGDALPKQYGHWYQQKPGQAPVLVIYKDSERPSGIPERFSGSSSGTTVTLTISGVQAEDEADYYCQSADSSDTYLWVFGGGTKLTVL

SEQ ID NO: 3180 - protein, 12 aa, synthetic construct
  REGION 1..12: note = Synthetic
QSADSSDTYLWV

SEQ ID NO: 3181 - protein, 127 aa, synthetic construct
  REGION 1..127: note = Synthetic
EVQLVESGGGLVKPGGSLRLSCAASGFTFSNAWMTWVRQAPGKGLEWVGRIKSKTDGGTTDYAAPVKGRFTISRDDSRNTLYLQMNSLKTDDTAVYYCTTGGGVFRFLEWLSDFDYWGQGTLVTVSS

SEQ ID NO: 3182 - protein, 18 aa, synthetic construct
  REGION 1..18: note = Synthetic
TTGGGVFRFLEWLSDFDY

SEQ ID NO: 3183 - protein, 111 aa, synthetic construct
  REGION 1..111: note = Synthetic
QSVLTQPPSVSEAPRQRVTISCSGSSSNIGNNAVNWYQQLPGKAPKLLIYYDDLLPSGVSDRFSGSKSGTSASLAISGLQSEDEADYYCAAWDDSLNGHVVFGGGTKLTVL

SEQ ID NO: 3184 - protein, 12 aa, synthetic construct
  REGION 1..12: note = Synthetic
AAWDDSLNGHVV

SEQ ID NO: 3185 - protein, 117 aa, synthetic construct
  REGION 1..117: note = Synthetic
QVQLVESGGGVVQPGRSLRLSCAASGFTFSSYAMHWVRQAPGKGLEWVAGISYDGSNKYYADSVKGRFTISRDNSKNTLYLQMNSLRVEDTAVYYCARDLGGYFDLWGRGTLVTVSS

SEQ ID NO: 3186 - protein, 10 aa, synthetic construct
  REGION 1..10: note = Synthetic
ARDLGGYFDL

SEQ ID NO: 3187 - protein, 108 aa, synthetic construct
  REGION 1..108: note = Synthetic
SYVLTQPPSVSVSPGQTARITCSGDALPNQYAYWYQQKPGQAPVLVIYKDSERPSGIPERFSGSSSGTTVTLTISGVQAEDEADYYCQSADSSGPFSVFGTGTKVTVL

SEQ ID NO: 3188 - protein, 11 aa, synthetic construct
  REGION 1..11: note = Synthetic
QSADSSGPFSV

SEQ ID NO: 3189 - protein, 121 aa, synthetic construct; identical to SEQ ID NO: 261
  REGION 1..121: note = Synthetic

SEQ ID NO: 3190 - protein, 14 aa, synthetic construct
  REGION 1..14: note = Synthetic
ARHRTGTPYDAFDI

SEQ ID NO: 3191 - protein, 107 aa, synthetic construct
  REGION 1..107: note = Synthetic
DIQMTQSPXSLSASVGDRVTITCQASQDISNYLNWYQQKPGKAPKLLIYDASNLETGVPARFSGSGSGTDFTFTISSLQPEDVATYYCQQYENVEVTFGPGTKVDIK

SEQ ID NO: 3192 - protein, 9 aa, synthetic construct
  REGION 1..9: note = Synthetic
QQYENVEVT

SEQ ID NO: 3193 - protein, 127 aa, synthetic construct; identical to SEQ ID NO: 263
  REGION 1..127: note = Synthetic

SEQ ID NO: 3194 - protein, 20 aa, synthetic construct
  REGION 1..20: note = Synthetic
AKDRWVGIRRVAPISGGFDY

SEQ ID NO: 3195 - protein, 107 aa, synthetic construct; identical to SEQ ID NO: 264
  REGION 1..107: note = Synthetic

SEQ ID NO: 3196 - protein, 9 aa, synthetic construct
  REGION 1..9: note = Synthetic
LQHYSYPLT

SEQ ID NO: 3197 - protein, 119 aa, synthetic construct
  REGION 1..119: note = Synthetic
QVQLQQWGAGLLKPSETLSLTCAVYGGSFSGYYWSWIRQPPGKGLEWIGEINHSGSTNYNPSLKSRVTISVDTSKNQFSLKLTSVTAADTAVYYCARGWGSSWYRFDPWGQGTLVTVSS

SEQ ID NO: 3198 - protein, 13 aa, synthetic construct
  REGION 1..13: note = Synthetic
ARGWGSSWYRFDP

SEQ ID NO: 3199 - protein, 110 aa, synthetic construct
  REGION 1..110: note = Synthetic
QSVLTQPASVSGSPGQSITISCTGTSSDVGSYNLVSWYQQHPGKAPKVMIYEGSKRPSGVSNRFSGSKSGNTASLTISGLQAEDEADYYCCSYAGSSTWVFGGGTKLTVL

SEQ ID NO: 3200 - protein, 10 aa, synthetic construct
  REGION 1..10: note = Synthetic
CSYAGSSTWV

SEQ ID NO: 3201 - protein, 122 aa, synthetic construct
  REGION 1..122: note = Synthetic
QVQLVESGGGVVQPGRSLRLSCAASGFTFSSYGMHWVRQAPGKGLEWVAVISYDGSNKYYADSVKGRFTISRDNSKNTLYLQMNSLRVEDTAVYCCAGEDFGVLMSGGYFYYGMDVWGRGTT

SEQ ID NO: 3202 - protein, 20 aa, synthetic construct
  REGION 1..20: note = Synthetic
AGEDFGVLMSGGYFYYGMDV

SEQ ID NO: 3203 - protein, 105 aa, synthetic construct
  REGION 1..105: note = Synthetic
SYXLTQPPSVSVSPGQTASITCSGDKLGDKYAYWYQQKPGQSPVLVIYQDTKRPSGIPERFSGSNSGNTATLTISGTQALDEADYYCQAWDSSTVVFGGGTKLTV

SEQ ID NO: 3204 - protein, 9 aa, synthetic construct
  REGION 1..9: note = Synthetic
QAWDSSTVV

SEQ ID NO: 3205 - protein, 124 aa, synthetic construct
  REGION 1..124: note = Synthetic
EVQLLESGGDLVQPGGSLRLSCAASGFTFSSYAMSWVRQAPGKGLEWVSAISGSGGSTYYADSVKGRFTISRDNSKNTLYLRMHSLRAEDTAVYYCAKEISSSWYPPIDPFDYWGQGTLVTVSS

SEQ ID NO: 3206 - protein, 17 aa, synthetic construct
  REGION 1..17: note = Synthetic
AKEISSSWYPPIDPFDY

SEQ ID NO: 3207 - protein, 106 aa, synthetic construct
  REGION 1..106: note = Synthetic
DIQMTQSPSTLSASVGDRVTITCRASQSISSWLAWYQQKPGKAPKLLIYKASSLESGVPSRFSGSGSGTEFTLTISSLQPDDFATYYCQQYNSYSSFGQGTKLEIK

SEQ ID NO: 3208 - protein, 8 aa, synthetic construct
  REGION 1..8: note = Synthetic
QQYNSYSS

SEQ ID NO: 3209 - protein, 122 aa, synthetic construct
  REGION 1..122: note = Synthetic
QVQLVQSGAEVKKPGASVKVSCKVSGYTLIELSMHWVRQAPGKGLEWMGGFDPEDVATIYARKFQGRVTMTEDTSTDTAYMELSSLRSEDTAVYYCATAFAVAGKRAAIAYWGQGTLVSVSS

SEQ ID NO: 3210 - protein, 15 aa, synthetic construct
  REGION 1..15: note = Synthetic
ATAFAVAGKRAAIAY

SEQ ID NO: 3211 - protein, 112 aa, synthetic construct
  REGION 1..112: note = Synthetic
DIVMTQSPXSLPVTPGEPASISCRSSQSLLHSNGYNYLDWYLQKPGQSPQLLIYLGSDRASGVPDRFSGSGSGTDFTLKISRVEAEDVGVYYCMQALQTPRTFGQGTKVEIK

SEQ ID NO: 3212 - protein, 9 aa, synthetic construct
  REGION 1..9: note = Synthetic
MQALQTPRT

SEQ ID NO: 3213 - protein, 124 aa, synthetic construct
  REGION 1..124: note = Synthetic
QVQLQQWGAGLLKPSETLSLTCAVYGGSFSGYYWSWIRQPPGKGLEWIGEINHSGSTNYNPSLKTRVTISVDTSKNHFSLKLSSVTAADTAVYYCARGLRGVVVAATLNWFDPWGQGTLVTVSS

SEQ ID NO: 3214 - protein, 18 aa, synthetic construct
  REGION 1..18: note = Synthetic
ARGLRGVVVAATLNWFDP

SEQ ID NO: 3215 - protein, 110 aa, synthetic construct
  REGION 1..110: note = Synthetic
QSVLTQPPSASGAPGQRVTISCSGSSSNIGSNTVNWYQQLPGTAPKLLIYNNNQRPSGVPDRFSGSKSGTSASLAISGLQSEDEADYYCAAWDDSLNGPVFGRGTKLTVL

SEQ ID NO: 3216 - protein, 11 aa, synthetic construct
  REGION 1..11: note = Synthetic
AAWDDSLNGPV

SEQ ID NO: 3217 - protein, 123 aa, synthetic construct; identical to SEQ ID NO: 273
  REGION 1..123: note = Synthetic

SEQ ID NO: 3218 - protein, 15 aa, synthetic construct
  REGION 1..15: note = Synthetic
ARGFGSSWPYSWFDP

SEQ ID NO: 3219 - protein, 109 aa, synthetic construct
  REGION 1..109: note = Synthetic
SYVLTQPPSVSVAPGQTARITCGGNNIGSKSVHWYQQKPGQAPVLVVNDDSDRPSGIPERFSGSNSGNTATLTISRVEAGDEADYYCQVWDSSSDHYVVFGGGTQLTVL

SEQ ID NO: 3220 - protein, 12 aa, synthetic construct
  REGION 1..12: note = Synthetic
QVWDSSSDHYVV

SEQ ID NO: 3221 - protein, 123 aa, synthetic construct
  REGION 1..123: note = Synthetic
QVQLVQSGAEVKKPGASVKVSCKVSGYTLIEISMHWVRQAPGKGLEWMGGFDPEDVKTIYAQKFQGRVTMTEDTSTDTAYMELSSLRSEDTAVYYCAASTAHSSAYPNWFDPWGQGTLVTVSS

SEQ ID NO: 3222 - protein, 16 aa, synthetic construct
  REGION 1..16: note = Synthetic
AASTAHSSAYPNWFDP

SEQ ID NO: 3223 - protein, 110 aa, synthetic construct
  REGION 1..110: note = Synthetic
QSVLTQPPSVSAAPGHKVTISCSGSSSNIGNNYVSWYQQFPGTAPKLLIYDTNKRPSGIPDRFSGSKSGTSATLGITGLQTGDEADYYCGTWDSSLSGWVFGGGTKLTVL

SEQ ID NO: 3224 - protein, 11 aa, synthetic construct
  REGION 1..11: note = Synthetic
GTWDSSLSGWV

SEQ ID NO: 3225 - protein, 126 aa, synthetic construct
  REGION 1..126: note = Synthetic
QVQLVQSGAEVKKPGASVKVSCKVSGYTLIELSMHWVRQGLGKGLEWMGGFDPEDGEIIYAQKFQGRVTMTEDTSTDTAYMELSSLRSEDTAVYYCATSSPTSQIVGATAGWFDPWGQGTLVTVSS

SEQ ID NO: 3226 - protein, 19 aa, synthetic construct
  REGION 1..19: note = Synthetic
ATSSPTSQIVGATAGWFDP

SEQ ID NO: 3227 - protein, 110 aa, synthetic construct
  REGION 1..110: note = Synthetic
QSVLTQPASVSGSPGQSITISCTGTSSDVGRYNYVSWYQQHPGKAPKLMIYEVSNRPSGVSNRFSGSKSGNTASLTISGLQSEDEADYYCSSYTTSSLYVFGTGTKVTVL

SEQ ID NO: 3228 - protein, 10 aa, synthetic construct
  REGION 1..10: note = Synthetic
SSYTTSSLYV

SEQ ID NO: 3229 - protein, 121 aa, synthetic construct
  REGION 1..121: note = Synthetic
EVQLVQSGAEVKKPGESLKISCKGSGYSFTSYWIGWVCQMPGKGLEWMGIIYLGDSDIRYSPSFQGQVTISADKSISTAYLQWSSLKASDSAMYYCATAAGGYDPYYFEYWGQGTLVTVSS

SEQ ID NO: 3230 - protein, 14 aa, synthetic construct
  REGION 1..14: note = Synthetic
ATAAGGYDPYYFEY

SEQ ID NO: 3231 - protein, 113 aa, synthetic construct
  REGION 1..113: note = Synthetic
DIVMTQSPDSLAVSLGERATINCKSSQSVLYSSNNKNYLAWYQQKPGQPPKLLIFWASTRDSGVTDRFSGSGSGTDFTLTISSLQAEDVAVYYCQQYYTTPGTFGQGTKVEIK

SEQ ID NO: 3232 - protein, 9 aa, synthetic construct
  REGION 1..9: note = Synthetic
QQYYTTPGT

SEQ ID NO: 3233 - protein, 120 aa, synthetic construct
  REGION 1..120: note = Synthetic
EVQLVESGGGLVQPGRSLRLSCAASGFTFDDYAMHWVRQAPGKGLEWVSGISWNSDSRGYADSVKGRFTISRDYAKNSLYLQMNSLRAEDTALYYCAKDIGYSSGSIDYWGQGTQVTVSS

SEQ ID NO: 3234 - protein, 13 aa, synthetic construct
  REGION 1..13: note = Synthetic
AKDIGYSSGSIDY

SEQ ID NO: 3235 - protein, 110 aa, synthetic construct
  REGION 1..110: note = Synthetic
QSVLTQPPSASGTPGQRVTISCSGSSSNIGSNTVNWYQQLPGTAPKLLIYSNNQRPSGVPDRFSGSKSGTSASLAISGLQSEDEADYYCAAWDDSLSGVVFGGGTKLTVL

SEQ ID NO: 3236 - protein, 11 aa, synthetic construct
  REGION 1..11: note = Synthetic
AAWDDSLSGVV

SEQ ID NO: 3237 - protein, 126 aa, synthetic construct
  REGION 1..126: note = Synthetic
EVQLVESGGGLVKPGGSLRLSCAASGFTFSSYTMNWVRQAPGKGLEWVSCISSSNSYKSYADSAKGRFTISRDNAKNSLFLQMNSLRAEDTAVYYCAREYDSSGYHYIQPLTLDYWGQGTLVTVSS

SEQ ID NO: 3238 - protein, 19 aa, synthetic construct
  REGION 1..19: note = Synthetic
AREYDSSGYHYIQPLTLDY

SEQ ID NO: 3239 - protein, 107 aa, synthetic construct
  REGION 1..107: note = Synthetic
AIQMTQSPXXLSASVGDRVTITCRASQGIRNDLGWYQQKPGKAPKLLIYAASSLQSGVPSRFSGSGSGTDFTLTISSLQPEDFATYYCLQDYNYPRTFGQGTKVEIK

SEQ ID NO: 3240 - protein, 9 aa, synthetic construct
  REGION 1..9: note = Synthetic
LQDYNYPRT

SEQ ID NO: 3241 - protein, 125 aa, synthetic construct
  REGION 1..125: note = Synthetic
EVQLVESGGGLVKPGGSLRLSCAASGFTFSSYSMNWVRQAPGKGLEWVSSISSSSNYIYYADSVKGRFTISRDNAKNSLYLQMNSLRAEDTAVYYCARWSYFDSRGYYPSPFDYWGQGTLVTVSS

SEQ ID NO: 3242 - protein, 18 aa, synthetic construct
  REGION 1..18: note = Synthetic
ARWSYFDSRGYYPSPFDY

SEQ ID NO: 3243 - protein, 108 aa, synthetic construct
  REGION 1..108: note = Synthetic
EIVMTQSPXXLSVSPGERATLSCRASQSVSSNLAWYQQKPGQAPRLLIYGASTRATGFPARFSGSGSGTEFTLTISSLQSEDFAVYYCQQYYNWPPWTFGQGTKVEIK

SEQ ID NO: 3244 - protein, 10 aa, synthetic construct
  REGION 1..10: note = Synthetic
QQYYNWPPWT

SEQ ID NO: 3245 - protein, 121 aa, synthetic construct
  REGION 1..121: note = Synthetic
QLQLQESGPGLVKPSETLSLTCTVSGGSIASSSYYWGWIRQPPGKGLEWIGSIHHSGSTSYNPSLKSRITMSVDPSKSQFSLKLTSVTAADTAIYYCAKRHLGSLGGMDVWGQGTTVTVSS

SEQ ID NO: 3246 - protein, 13 aa, synthetic construct
  REGION 1..13: note = Synthetic
AKRHLGSLGGMDV

SEQ ID NO: 3247 - protein, 109 aa, synthetic construct
  REGION 1..109: note = Synthetic
EIVMTQSPATLSVSPGERATLSCRASQIISTNLAWYQQKPGQAPRLLIHGASTRATGIPARFSGSGSGTEFTLTISSLQSEDFAVYYCQQYNNWPPVVTFGQGTRLEIK

SEQ ID NO: 3248 - protein, 11 aa, synthetic construct
  REGION 1..11: note = Synthetic
QQYNNWPPVVT

SEQ ID NO: 3249 - protein, 125 aa, synthetic construct
  REGION 1..125: note = Synthetic
QVQLVESGGGLVKPGGSLRLSCTASGFTFSDYYMSWIRQAPGKGLEWLSYISSSSLMIYYADSVKGRFTISRDNAKNSLYLQMNSLRAEDTAIYYCVRVAQVYTRSWYFDAFDIWGQGTMVTVSS

SEQ ID NO: 3250 - protein, 18 aa, synthetic construct
  REGION 1..18: note = Synthetic
VRVAQVYTRSWYFDAFDI

SEQ ID NO: 3251 - protein, 107 aa, synthetic construct
  REGION 1..107: note = Synthetic
EIVMTQSPATLSVSPGERXTLSCRASQSVNTNLAWYQQKPGQPPRLLIYGVSTRATSIPARFSGSGSETEFTLTISSLLSEDFAVYYCQQYTNWPFTFGPGTKVDIK

SEQ ID NO: 3252 - protein, 9 aa, synthetic construct
  REGION 1..9: note = Synthetic
QQYTNWPFT

SEQ ID NO: 3253 - protein, 127 aa, synthetic construct; identical to SEQ ID NO: 307
  REGION 1..127: note = Synthetic

SEQ ID NO: 3254 - protein, 21 aa, synthetic construct
  REGION 1..21: note = Synthetic
VTATAVSGTRTNYQYHYGLDV

SEQ ID NO: 3255 - protein, 112 aa, synthetic construct
  REGION 1..112: note = Synthetic
DIVMTQTPLSSPVTLGQPASISCRSNQSLVHSDGDTYLSWLHQRPGQPPRVLIYKIFNRFSGVPDRFSGSGAGTDFTLKISRVEAEDVGVYYCMQATQFPFTFGPGTKVDLK

SEQ ID NO: 3256 - protein, 9 aa, synthetic construct
  REGION 1..9: note = Synthetic
MQATQFPFT

SEQ ID NO: 3257 - protein, 118 aa, synthetic construct
  REGION 1..118: note = Synthetic
QVQLVESGGGVVQPGRSLRLSCAASGFTFSGYGMHWVRRAPGKGLEWVTIISYDGSNKFYADSVKGRFTISRDNSKNTLYLQMNSLRPDDTAVYYCARDRSGWSIDTWGQGTLVTVSS

SEQ ID NO: 3258 - protein, 11 aa, synthetic construct
  REGION 1..11: note = Synthetic
ARDRSGWSIDT

SEQ ID NO: 3259 - protein, 113 aa, synthetic construct
  REGION 1..113: note = Synthetic
DVVMTQSPLSLPVTLGQPASISCRSSQSLVHSDGNVYLNWFHQRPGQSPRRLIYKVSNRDSGVPDRFSGSGSGTDFTLKISRVEAEDAGVYYCMQATHWPPWTFGQGTKVEIK

SEQ ID NO: 3260 - protein, 10 aa, synthetic construct
  REGION 1..10: note = Synthetic
MQATHWPPWT

SEQ ID NO: 3261 - protein, 124 aa, synthetic construct
  REGION 1..124: note = Synthetic
QVQLQQWGAGLLKPSETLSLTCAVSGGSISIYYWRWIRQSPGKGLEWIGDIDHSGSTNYNPSLKSRVTISVDTSKNQFSLNLTSVTAADTAVYYCARDLGITTWFGRGAGMDVWGQGTTVTVSS

SEQ ID NO: 3262 - protein, 18 aa, synthetic construct
  REGION 1..18: note = Synthetic
ARDLGITTWFGRGAGMDV

SEQ ID NO: 3263 - protein, 109 aa, synthetic construct
  REGION 1..109: note = Synthetic
EIVLTQSPATLSLSPGERATLSCRASQSVGTYLAWYQQKPGQVPRLLIYDASKRATGIPARFSGSGSGTDFTLTISSLEPEDFGLYYCQQRTNWPPAITFGQGTRLEIK

SEQ ID NO: 3264 - protein, 11 aa, synthetic construct
  REGION 1..11: note = Synthetic
QQRTNWPPAIT

SEQ ID NO: 3265 - protein, 127 aa, synthetic construct
  REGION 1..127: note = Synthetic
QVQLVQSGAEVKKPGASVKVSCKTSGYTLSSRFMHWVRQAPGQGLEWMGIINPSGGSTTYAQKFQGRVSVTRDTSTSTVYMELSSLRSEDTAVYYCARGGIVVVPAAIFQPDNFDHWGQGTLVTVSS

SEQ ID NO: 3266 - protein, 20 aa, synthetic construct
  REGION 1..20: note = Synthetic
ARGGIVVVPAAIFQPDNFDH

SEQ ID NO: 3267 - protein, 108 aa, synthetic construct
  REGION 1..108: note = Synthetic
EIVMTQSPATLSVSPGERATLSCWASQTISGDLAWFQQRLGQAPRLLIYGASTRATGVPARFSGSGSGTEFTLTISGLQSEDFAVYYCQQYHIWPLWTFGQGTKVEIK

SEQ ID NO: 3268 - protein, 10 aa, synthetic construct
  REGION 1..10: note = Synthetic
QQYHIWPLWT

SEQ ID NO: 3269 - protein, 126 aa, synthetic construct
  REGION 1..126: note = Synthetic
QVQLVESGGGVVQPGRSLRLSCAASGFSFNNYAMHWVRQAPGKGPEWVAVVSNDGSNTYYADSVKGRLSISRDNSKNTVFLQMNGLTTDDTAVYYCVRGALYFFYRYDNSGGFGYWGQGTLVIVSS

SEQ ID NO: 3270 - protein, 19 aa, synthetic construct
  REGION 1..19: note = Synthetic
VRGALYFFYRYDNSGGFGY

SEQ ID NO: 3271 - protein, 113 aa, synthetic construct; identical to SEQ ID NO: 3259
  REGION 1..113: note = Synthetic

SEQ ID NO: 3272 - protein, 10 aa, synthetic construct
  REGION 1..10: note = Synthetic
MQATHWPPWT

SEQ ID NO: 3273 - protein, 125 aa, synthetic construct
  REGION 1..125: note = Synthetic
QVQLVQSGAEVKKPGASVKVSCKAPAYMFASYGFTWVRQAPGQGLEWMGWVSGYRDNTNYVQKFQGRVTMTTDTSTTTAYMELRSLTSDDTAVYYCVSGPLRRSGWYTYYTLDVWGQGTTVTVSS

SEQ ID NO: 3274 - protein, 18 aa, synthetic construct
  REGION 1..18: note = Synthetic
VSGPLRRSGWYTYYTLDV

SEQ ID NO: 3275 - protein, 109 aa, synthetic construct
  REGION 1..109: note = Synthetic
DVVMTQSPLSLPVTLGQPASISCRSSQTLLVHSDGNTYQRPGQSPRRLIYEVSNRDSGVPDRLSGSGSGTDFTLKISRVEAEDVGVSYCMQTAHWPPITFGQGTRLEAK

SEQ ID NO: 3276 - protein, 10 aa, synthetic construct
  REGION 1..10: note = Synthetic
MQTAHWPPIT

SEQ ID NO: 3277 - protein, 126 aa, synthetic construct
  REGION 1..126: note = Synthetic
EVQLVESGGGLVKPGGSLRLSCAASGFTFGSFSMNWVRQAPGKGPEWVSSISSSSSFIYYADSMKGRFTISRDNAKNSLYLQMNSLRAEDTAVYYCAREWNFHHTSGYYYGEYDYWGQGTLVTVSS

SEQ ID NO: 3278 - protein, 19 aa, synthetic construct
  REGION 1..19: note = Synthetic
AREWNFHHTSGYYYGEYDY

SEQ ID NO: 3279 - protein, 108 aa, synthetic construct
  REGION 1..108: note = Synthetic
EIVLTQSPGTLSLSPGERATLSCRASQSFGSSNLAWYQQKPGQSPRLLIYGASNRATGIPDRFSGSGSGTNFTLTINRLEPEDFAVYYCQQYGSSPRTFGQGTKVEIK

SEQ ID NO: 3280 - protein, 9 aa, synthetic construct
  REGION 1..9: note = Synthetic
QQYGSSPRT

SEQ ID NO: 3281 - protein, 128 aa, synthetic construct
  REGION 1..128: note = Synthetic
QVQLVQSGAEVKKPGASVKVSCKVSGYTLTELSMHWVRQAPGKGLEWMGGFDPEEAETIYAQRFQSKVTMTEDTSTETAYMELSSLRSEDTAVYYCAAATAVSGTRASYHYHYGMDVWGQGTTVTVSS

SEQ ID NO: 3282 - protein, 21 aa, synthetic construct
  REGION 1..21: note = Synthetic
AAATAVSGTRASYHYHYGMDV

SEQ ID NO: 3283 - protein, 112 aa, synthetic construct
  REGION 1..112: note = Synthetic
DIVMTQSPDSLAVSLGERATINCKSSQSVLYSSNNKNYLAWYQQKPGQPPKLLIYWASTRESGVPDRFSGSGSGTDFTLTISSLQAEDVAVYYCQQYYSTPLTFGGGTKVEI

SEQ ID NO: 3284 - protein, 9 aa, synthetic construct
  REGION 1..9: note = Synthetic
QQYYSTPLT

SEQ ID NO: 3285 - protein, 128 aa, synthetic construct; identical to SEQ ID NO: 303
  REGION 1..128: note = Synthetic

SEQ ID NO: 3286 - protein, 21 aa, synthetic construct
  REGION 1..21: note = Synthetic
ARDLLTVLMAHTIPARSWFDS

SEQ ID NO: 3287 - protein, 107 aa, synthetic construct; identical to SEQ ID NO: 304
  REGION 1..107: note = Synthetic

SEQ ID NO: 3288 - protein, 9 aa, synthetic construct
  REGION 1..9: note = Synthetic
QQYKSNEDT

SEQ ID NO: 3289 - protein, 124 aa, synthetic construct; identical to SEQ ID NO: 321
  REGION 1..124: note = Synthetic

SEQ ID NO: 3290 - protein, 17 aa, synthetic construct
  REGION 1..17: note = Synthetic
ARVAAAEIYYYYYCMDV

SEQ ID NO: 3291 - protein, 107 aa, synthetic construct
  REGION 1..107: note = Synthetic
DIQLTQSPSFLSTSVGDRVTITCRASQGINSHLAWYQQKPGKAPNLLIYDASTLQSGVPSRFNGSGSGTEFALTISSLQPEDFATYYCQQLNSYPITFGQGTRLEIE

SEQ ID NO: 3292 - protein, 9 aa, synthetic construct
  REGION 1..9: note = Synthetic
QQLNSYPIT

SEQ ID NO: 3293 - protein, 124 aa, synthetic construct
  REGION 1..124: note = Synthetic
EVQLVESGGGLVQPGRSLRLSCAASGFNFDDYAIHWVRQAPGKGLEWVSVISYNSASKAYADFVKGRFTISRDNAKNSLYLQMNSLRVEDTALYYCVKDMTHRAIFGVGPFDRWGQGTQVTVSS

SEQ ID NO: 3294 - protein, 17 aa, synthetic construct
  REGION 1..17: note = Synthetic
VKDMTHRAIFGVGPFDR

SEQ ID NO: 3295 - protein, 107 aa, synthetic construct; identical to SEQ ID NO: 328
  REGION 1..107: note = Synthetic

SEQ ID NO: 3296 - protein, 9 aa, synthetic construct
  REGION 1..9: note = Synthetic
QQLNTYPLT

SEQ ID NO: 3297 - protein, 127 aa, synthetic construct; identical to SEQ ID NO: 311
  REGION 1..127: note = Synthetic

SEQ ID NO: 3298 - protein, 20 aa, synthetic construct
  REGION 1..20: note = Synthetic
ARVLKPHYDSSGYYEKISDY

SEQ ID NO: 3299 - protein, 108 aa, synthetic construct; identical to SEQ ID NO: 312
  REGION 1..108: note = Synthetic

SEQ ID NO: 3300 - protein, 10 aa, synthetic construct
  REGION 1..10: note = Synthetic
QQYHNWPPYT

SEQ ID NO: 3301 - protein, 128 aa, synthetic construct
  REGION 1..128: note = Synthetic
EVQLVESGGGLVKPGGFLRLSCAASGFNFSSYSMNWVRQAPGKGPEWVSSISGRSSFIYYADSVKGRFTISRDNAKNSLYLQMSSLRAEDTAVYYCARAIQSSSTWYSDYYYFGMDVWGQGTTVTVSS

SEQ ID NO: 3302 - protein, 21 aa, synthetic construct
  REGION 1..21: note = Synthetic
ARAIQSSSTWYSDYYYFGMDV

SEQ ID NO: 3303 - protein, 108 aa, synthetic construct
  REGION 1..108: note = Synthetic
EIVMTQSPATLSVSPGERATLSCRASQSVSTNLAWYQQKPGQAPRLLIYGASTRATGVPARFSGSGSGTEFTLTISSLQSEDFAVYYCQQCYNWPPWTFGQGTKVEIK

SEQ ID NO: 3304 - protein, 10 aa, synthetic construct
  REGION 1..10: note = Synthetic
QQCYNWPPWT

SEQ ID NO: 3305 - protein, 117 aa, synthetic construct
  REGION 1..117: note = Synthetic
EVQLLESGGGLVQPGGTLRLSCAASGFTFSTSAMSWVRQAPGKGLEWVSAISASGGSTYYADSVKGRFTISRDNSKSTLFLQMNSLRAEDTALYYCARLGSYFSDYWGQGTLVTVSS

SEQ ID NO: 3306 - protein, 10 aa, synthetic construct
  REGION 1..10: note = Synthetic
ARLGSYFSDY

SEQ ID NO: 3307 - protein, 108 aa, synthetic construct
  REGION 1..108: note = Synthetic
DIQMTQSPSSLSASVGNRVTITCRASQGIRNDLDWYQQKPGKAPKRLIYAASSLQSGVPSRFSGSGSGTEFTLTISSLQPEDFATYYCLQHNSYPALTFGGGTKVEIK

SEQ ID NO: 3308 - protein, 10 aa, synthetic construct
  REGION 1..10: note = Synthetic
LQHNSYPALT

SEQ ID NO: 3309 - protein, 127 aa, synthetic construct
  REGION 1..127: note = Synthetic
QVQLVESGGGVVQPGRSLRLSCAASGFTFRNYAMHWVRQAPGKGLEWVAAIPYDGSDEYHADSLKGRFTISRDNSKNTLYLQMNSLRPEDTGVYYCVRDFWIVVANTVGYYQGMDVWGQGTTVTVSS

SEQ ID NO: 3310 - protein, 20 aa, synthetic construct
  REGION 1..20: note = Synthetic
VRDFWIVVANTVGYYQGMDV

SEQ ID NO: 3311 - protein, 112 aa, synthetic construct
  REGION 1..112: note = Synthetic
DIVMTQTPLSSPVTLGQPASISCRSSQSLVHRDGNTYLSWLQQRPGQPPRLLIYQISKRVSGVPDRFSGSGAGTDFTLKISRVEAEDVGVYYCMQATQYSWTFGQGTKVEIK

SEQ ID NO: 3312 - protein, 9 aa, synthetic construct
  REGION 1..9: note = Synthetic
MQATQYSWT

SEQ ID NO: 3313 - protein, 119 aa, synthetic construct
  REGION 1..119: note = Synthetic
EVQLLESGGGLVQPGGSLKLSCAASGFTFSNYVMSWVRQAPGKGLEWVSLITVSGGGTFYADSVKGRFTISKDNSRNTLYLQMNRLRGEDTAIYYCAKGRGSYDNYFDYWGQGILVTVS

SEQ ID NO: 3314 - protein, 13 aa, synthetic construct
  REGION 1..13: note = Synthetic
AKGRGSYDNYFDY

SEQ ID NO: 3315 - protein, 106 aa, synthetic construct
  REGION 1..106: note = Synthetic
DIQMTQSPSTLSASVGDRVTITCRASQSINNWLAWYQQKPGKAPKLLIYQASSLESGVPSRFSGSGSGTEFTLTISSLQPDDFAIYYCQQYNSPFIFGPGTKVDIK

SEQ ID NO: 3316 - protein, 8 aa, synthetic construct
  REGION 1..8: note = Synthetic
QQYNSPFI

SEQ ID NO: 3317 - protein, 127 aa, synthetic construct; identical to SEQ ID NO: 309
  REGION 1..127: note = Synthetic

SEQ ID NO: 3318 - protein, 20 aa, synthetic construct
  REGION 1..20: note = Synthetic
VRETSPHDLWKGYYGGYFDF

SEQ ID NO: 3319 - protein, 108 aa, synthetic construct; identical to SEQ ID NO: 310
  REGION 1..108: note = Synthetic

SEQ ID NO: 3320 - protein, 10 aa, synthetic construct
  REGION 1..10: note = Synthetic
QQYHNWPPRT

SEQ ID NO: 3321 - protein, 127 aa, synthetic construct; identical to SEQ ID NO: 307
  REGION 1..127: note = Synthetic

SEQ ID NO: 3322 - protein, 21 aa, synthetic construct
  REGION 1..21: note = Synthetic
VTATAVSGTRTNYQYHYGLDV

SEQ ID NO: 3323 - protein, 112 aa, synthetic construct; identical to SEQ ID NO: 3255
  REGION 1..112: note = Synthetic

SEQ ID NO: 3324 - protein, 9 aa, synthetic construct
  REGION 1..9: note = Synthetic
MQATQFPFT

SEQ ID NO: 3325 - protein, 124 aa, synthetic construct
  REGION 1..124: note = Synthetic
QVQLQESGPGLVKPSQTLSLTCIVSGDSISGGDYLWXGXRLPPRKGXXXTGHIHHRRNIWCIHSLRSRVTISLDTSKNQFSLKLSSVAAADTAVYYCARGLTIFGVIGDYFDSWGPGTLVTVSS

SEQ ID NO: 3326 - protein, 16 aa, synthetic construct
  REGION 1..16: note = Synthetic
ARGLTIFGVIGDYFDS

SEQ ID NO: 3327 - protein, 108 aa, synthetic construct; identical to SEQ ID NO: 332
  REGION 1..108: note = Synthetic

SEQ ID NO: 3328 - protein, 11 aa, synthetic construct
  REGION 1..11: note = Synthetic
QQRTGWPPAIT

SEQ ID NO: 3329 - protein, 125 aa, synthetic construct; identical to SEQ ID NO: 325
  REGION 1..125: note = Synthetic

SEQ ID NO: 3330 - protein, 17 aa, synthetic construct
  REGION 1..17: note = Synthetic
ARLNSGEGYANLGVADS

SEQ ID NO: 3331 - protein, 107 aa, synthetic construct; identical to SEQ ID NO: 326
  REGION 1..107: note = Synthetic

SEQ ID NO: 3332 - protein, 9 aa, synthetic construct
  REGION 1..9: note = Synthetic
LQHNSYPLT

SEQ ID NO: 3333 - protein, 124 aa, synthetic construct
  REGION 1..124: note = Synthetic
QVQLVESGGGVVQPGRSLTLSCVASGFNFTRNGMHWVRQAPGKGLEWVALISYHGRNKYYADSVKGRFSISRDNSKNTLYLEIHSLRGEDTAVYYCAREEILYYYGSRGAFDLWGRGTVVTVSS

SEQ ID NO: 3334 - protein, 17 aa, synthetic construct
  REGION 1..17: note = Synthetic
AREEILYYYGSRGAFDL

SEQ ID NO: 3335 - protein, 108 aa, synthetic construct
  REGION 1..108: note = Synthetic
EIVMTQSPATLSVSPGERATLSCRASQSVSSNLAWYQQKPGQAPRLLIYGASTRATGIPARFSGSGSGTDFTLTITSLQSEDFAVYYCQQYNYWPPWTFGQGTKVEIK

SEQ ID NO: 3336 - protein, 10 aa, synthetic construct
  REGION 1..10: note = Synthetic
QQYNYWPPWT

SEQ ID NO: 3337 - protein, 123 aa, synthetic construct
  REGION 1..123: note = Synthetic
QLQLQESGPGLVRPSETLSLTCSVSGGSISGSNSYWAWIRQPPGKGLEWIGNIFYSGITYYNPSLESRVTMLVDTSKNQFSLKLSSVTAADTALYYCAFYEVGYSSDSGFDPWGQGIFVTVSS

SEQ ID NO: 3338 - protein, 15 aa, synthetic construct
  REGION 1..15: note = Synthetic
AFYEVGYSSDSGFDP

SEQ ID NO: 3339 - protein, 107 aa, synthetic construct
  REGION 1..107: note = Synthetic
DIQMTQSPSSLSATVGDRVTITCRASQGIRNDLGWYQQKPGKAPKRLIYAASSLQSGVPSRFSGSGSGTAFTLTISSLQPEDFATYYCQQYHSYPITFGGGTKVEIK

SEQ ID NO: 3340 - protein, 9 aa, synthetic construct
  REGION 1..9: note = Synthetic
QQYHSYPIT

SEQ ID NO: 3341 - protein, 130 aa, synthetic construct; identical to SEQ ID NO: 315
  REGION 1..130: note = Synthetic

SEQ ID NO: 3342 - protein, 22 aa, synthetic construct
  REGION 1..22: note = Synthetic
ARETRYCSGASCSGGYHYGMDV

SEQ ID NO: 3343 - protein, 108 aa, synthetic construct; identical to SEQ ID NO: 316
  REGION 1..108: note = Synthetic

SEQ ID NO: 3344 - protein, 10 aa, synthetic construct
  REGION 1..10: note = Synthetic
QQSNNWPPWT

SEQ ID NO: 3345 - protein, 128 aa, synthetic construct
  REGION 1..128: note = Synthetic
EVQLVESGGGLVQPGRSLRLSCVGSGFTFDEYALHWVRQAPGKGLEWVSGISWNSHTIAYVDSVKGRFTISRDNAKNSLYLQMNSLRPEDTAFYYCAKDIDTVEMVTQGPYYYGMDVWGQGTMVTVSS

SEQ ID NO: 3346 - protein, 21 aa, synthetic construct
  REGION 1..21: note = Synthetic
AKDIDTVEMVTQGPYYYGMDV

SEQ ID NO: 3347 - protein, 107 aa, synthetic construct
  REGION 1..107: note = Synthetic
DIQMTQSPSSLSASVGDRVTITCRASQSISSYLNWYQQKPGKALKLLDLCCIYFAKLGSHQGFSGSGSGTDFSLTISSLQPEDIATYYCQQSHSTPRTFGPGTKVAI

SEQ ID NO: 3348 - protein, 9 aa, synthetic construct
  REGION 1..9: note = Synthetic
QQSHSTPRT

SEQ ID NO: 3349 - protein, 123 aa, synthetic construct; identical to SEQ ID NO: 3337
  REGION 1..123: note = Synthetic

SEQ ID NO: 3350 - protein, 15 aa, synthetic construct
  REGION 1..15: note = Synthetic
AFYEVGYSSDSGFDP

SEQ ID NO: 3351 - protein, 107 aa, synthetic construct; identical to SEQ ID NO: 3339
  REGION 1..107: note = Synthetic

SEQ ID NO: 3352 - protein, 9 aa, synthetic construct
  REGION 1..9: note = Synthetic
QQYHSYPIT

SEQ ID NO: 3353 - protein, 123 aa, synthetic construct; identical to SEQ ID NO: 335
  REGION 1..123: note = Synthetic

SEQ ID NO: 3354 - protein, 16 aa, synthetic construct
  REGION 1..16: note = Synthetic
AKVRYGYRYSYYGMDV

SEQ ID NO: 3355 - protein, 107 aa, synthetic construct
  REGION 1..107: note = Synthetic
DIQMTQSPSSLSASVGDRVTITCQASQDIKNYLNWYQQKPGKVPKLLIYDASNLEMGVPFRFSGSGSGTDFSFTIISLQPEDIATYYCQQYDNLPSSFGQGTKVEIK

SEQ ID NO: 3356 - protein, 9 aa, synthetic construct
  REGION 1..9: note = Synthetic
QQYDNLPSS

SEQ ID NO: 3357 - protein, 126 aa, synthetic construct
  REGION 1..126: note = Synthetic
EVQLVESGGDLVQPGGSLRLACAASGFDFSTYSMSWVRQAPGKGLEWVSYISSSGSTKFYGASAKGRFTISRDNAKKLLYLQMNSLRDEDTAVFYCSTSSSGDIVVAPATSPADYWGQGTLVTVSS

SEQ ID NO: 3358 - protein, 19 aa, synthetic construct
  REGION 1..19: note = Synthetic
STSSSGDIVVAPATSPADY

SEQ ID NO: 3359 - protein, 113 aa, synthetic construct
  REGION 1..113: note = Synthetic
DIVMTQSPDSLAVSLGERXTINCKSSQSLLYRSNNKKLLAWYQKKPGQPPKLLIYWASTRESGVSDRFSGSGSGTDFTLTISSLQAEDVAVYYCQQYYTIPWTFGQGTKVEIK

SEQ ID NO: 3360 - protein, 9 aa, synthetic construct
  REGION 1..9: note = Synthetic
QQYYTIPWT

SEQ ID NO: 3361 - protein, 119 aa, synthetic construct
  REGION 1..119: note = Synthetic
QVQLQQWGAGLLKPSETLSLTCAVDGGHFIGFYWSWIRLPPGKGLEWIGEIDHSGGTTYKPSLKSRVTMSVDKSKKEFYLKLTSVTAADTAVYYCARGVAVTGTHFDYWGQGTVVTVSS

SEQ ID NO: 3362 - protein, 13 aa, synthetic construct
  REGION 1..13: note = Synthetic
ARGVAVTGTHFDY

SEQ ID NO: 3363 - protein, 107 aa, synthetic construct
  REGION 1..107: note = Synthetic
DIQMTQSPSSVSASVGDRVTITCRASQGISSWLAWYQQKPGKAPKLLIYAASSLQKWGPLKVQRQWDLGTDFTLTISSLQPEDFATYYCQQATYVPWTFGQGTKVEI

SEQ ID NO: 3364 - protein, 9 aa, synthetic construct
  REGION 1..9: note = Synthetic
QQATYVPWT

SEQ ID NO: 3365 - protein, 123 aa, synthetic construct; identical to SEQ ID NO: 329
  REGION 1..123: note = Synthetic

SEQ ID NO: 3366 - protein, 16 aa, synthetic construct
  REGION 1..16: note = Synthetic
ARDIDSMVTPGSRLDP

SEQ ID NO: 3367 - protein, 106 aa, synthetic construct
  REGION 1..106: note = Synthetic
SYVLTQPPSVSVFPGQTATITCSGDKLGDEYTFWYQQKPGQSPVLVIYLDTKRPSGIPERFSGSNSGNTATLTISGTQAMDEADYYCQAWDSRVVVFGGGTKLTVL

SEQ ID NO: 3368 - protein, 9 aa, synthetic construct
  REGION 1..9: note = Synthetic
QAWDSRVVV

SEQ ID NO: 3369 - protein, 130 aa, synthetic construct
  REGION 1..130: note = Synthetic
EVQLVESGGGLVKPGGSLRLSCAASGFNFTTYNMNWVRQAAGKGLEWVASISSRSNYIYYVDSVKGRFTVSRGNAKNSLYLQMNSLRVEDTAVYYCARGTYGPGTYYSLGDYYYYGMDVWGQGTMVTVSS

SEQ ID NO: 3370 - protein, 23 aa, synthetic construct
  REGION 1..23: note = Synthetic
ARGTYGPGTYYSLGDYYYYGMDV

SEQ ID NO: 3371 - protein, 108 aa, synthetic construct
  REGION 1..108: note = Synthetic
EIVMTQSPATLSVSPGDRATLSCRASQTVDSNLAWYQQKPGQAPRLLIYEASTRATGIPARFSGSGSGTEFTLTISSLQSEDFAIYYCQQYHNWPPWTFGQGTKVEIK

SEQ ID NO: 3372 - protein, 10 aa, synthetic construct
  REGION 1..10: note = Synthetic
QQYHNWPPWT

SEQ ID NO: 3373 - protein, 119 aa, synthetic construct
  REGION 1..119: note = Synthetic
QVQLQQWGAGLLKPSETLSLTCAVDGGYFSGFYWSWIRQPPGKGLEWIGEIDHSGGTTYKPSLKSRVTMSVDKSKKEFSLKLTSVTAADTAVYYCARGIAVTGTHFDYWGQGTVVTVSS

SEQ ID NO: 3374 - protein, 13 aa, synthetic construct
  REGION 1..13: note = Synthetic
ARGIAVTGTHFDY

SEQ ID NO: 3375 - protein, 107 aa, synthetic construct
  REGION 1..107: note = Synthetic
DIQMTQSPSSVSASVGDRVTITCRASPAISSWLAWYQQKPGKAPKLLIYAASSLQSGVPSRFSGSGSGTDFTLTISSLQPEDFATYYCQQATYVPWTFGQGTKVEIK

SEQ ID NO: 3376 - protein, 9 aa, synthetic construct
  REGION 1..9: note = Synthetic
QQATYVPWT

SEQ ID NO: 3377 - protein, 126 aa, synthetic construct
  REGION 1..126: note = Synthetic
QVQLQESGPGLVKPSETLSLTCTVSGGSISSYYWSWIRQPPGKGLQWIGYIYYSGSTNYNPSLKSRVTISVDTSKNQFSLNLSSVTAADTAVYYCARGGESFYYYDSSGSGAFDIWGQGTMVTVSS

SEQ ID NO: 3378 - protein, 20 aa, synthetic construct
  REGION 1..20: note = Synthetic
ARGGESFYYYDSSGSGAFDI

SEQ ID NO: 3379 - protein, 109 aa, synthetic construct
  REGION 1..109: note = Synthetic
EIVLTQSPGTLSLSPGERATLSCRASQGVRSSYLAWYQQKPGQGPRLLIYGASRRATGIPDRFSGSGSGTDFTLTISRLEPEDFAVYYCQQYGGSPPLTFGPGTKVDIK

SEQ ID NO: 3380 - protein, 10 aa, synthetic construct
  REGION 1..10: note = Synthetic
QQYGGSPPLT

SEQ ID NO: 3381 - protein, 128 aa, synthetic construct
  REGION 1..128: note = Synthetic
QVQLVQSGAEVKKPGASVKVSCQVSGYSLTELSIHWVRQAPGKGLEWMGGFEPENAKTIYAQRFQGRLTLTEDTSTDTAYMELSSLRSDDTAVYYCATAFAVTGTPASYNYYYGLDVWGQGTTVTVSS

SEQ ID NO: 3382 - protein, 21 aa, synthetic construct
  REGION 1..21: note = Synthetic
ATAFAVTGTPASYNYYYGLDV

SEQ ID NO: 3383 - protein, 112 aa, synthetic construct
  REGION 1..112: note = Synthetic
DIVMTQTPLSSPVTLGQPASISCTSSQSLVHSDGNTYLSWLHQRPGQPPRLLFYKISNRVSGVPDRFSGSGAGTDFTLKISRAEAEDVGVYYCMQATQFPFTFGPGTKVDIK

SEQ ID NO: 3384 - protein, 9 aa, synthetic construct
  REGION 1..9: note = Synthetic
MQATQFPFT

SEQ ID NO: 3385 - protein, 121 aa, synthetic construct
  REGION 1..121: note = Synthetic
QVQLVQSGAEVKKPGASVKVSCKVSGYTLIELAMHWVRQAPGKGLEWMGGFDPEDVKTIYAQKFQGRVTMTEDTSTDTAYLELSSLRFEDTAVYYCATRYAVNGRGLVDFWGQGTLVTVSS

SEQ ID NO: 3386 - protein, 14 aa, synthetic construct
  REGION 1..14: note = Synthetic
ATRYAVNGRGLVDF

SEQ ID NO: 3387 - protein, 110 aa, synthetic construct
  REGION 1..110: note = Synthetic
QSVLTQPPSVSAAPGQKVTISCSGSSSNIGNHFVSWYQQLPGTAPKVLIYEDNKRPSGIPDRFSGSKSGTSATLGITGLQTGDEADYYCGTWDISLSAGVFGGGTKLTVL

SEQ ID NO: 3388 - protein, 11 aa, synthetic construct
  REGION 1..11: note = Synthetic
GTWDISLSAGV

SEQ ID NO: 3389 - protein, 125 aa, synthetic construct
  REGION 1..125: note = Synthetic
QVQLQQWGAGLLKPSETLSLTCAVYGGPFRAYYWSWIRQPPGRGLEWIGEINHSGSTNYNPSLKSRVTILVDTSKNQFSLKLSSVTAADTAAYYCARGVVVVAAATRNIGWFDPWGQGTLVTVSS

SEQ ID NO: 3390 - protein, 19 aa, synthetic construct
  REGION 1..19: note = Synthetic
ARGVVVVAAATRNIGWFDP

SEQ ID NO: 3391 - protein, 110 aa, synthetic construct
  REGION 1..110: note = Synthetic
QSVLTQPASVSGSPGQSITISCTGTSSDVGTYNLVSWYQQHPGKAPKFIIYEGNKRPSGVSHRFSGSKSGNTASLTISGLQAEDEADYYCCSHASSTHVVFGGGTKVTVL

SEQ ID NO: 3392 - protein, 10 aa, synthetic construct
  REGION 1..10: note = Synthetic
CSHASSTHVV

SEQ ID NO: 3393 - protein, 123 aa, synthetic construct; identical to SEQ ID NO: 333
  REGION 1..123: note = Synthetic

SEQ ID NO: 3394 - protein, 16 aa, synthetic construct
  REGION 1..16: note = Synthetic
ARGTCVGTCDPQKFDY

SEQ ID NO: 3395 - protein, 106 aa, synthetic construct; identical to SEQ ID NO: 334
  REGION 1..106: note = Synthetic

SEQ ID NO: 3396 - protein, 9 aa, synthetic construct
  REGION 1..9: note = Synthetic
QQYDNLPLT

SEQ ID NO: 3397 - protein, 123 aa, synthetic construct; identical to SEQ ID NO: 295
  REGION 1..123: note = Synthetic

SEQ ID NO: 3398 - protein, 15 aa, synthetic construct
  REGION 1..15: note = Synthetic
AFYEVGYSNDYGFDP

SEQ ID NO: 3399 - protein, 107 aa, synthetic construct; identical to SEQ ID NO: 296
  REGION 1..107: note = Synthetic

SEQ ID NO: 3400 - protein, 9 aa, synthetic construct
  REGION 1..9: note = Synthetic
LQYNSYPLT

SEQ ID NO: 3401 - protein, 123 aa, synthetic construct
  REGION 1..123: note = Synthetic
EVQLVESGGGLVKPGGSLRLSCAASGFIFTDAWMSWVRQAPGKGLEWIGRIKSKIDGGTTDYAAPVKGRFTISRDDSKNTLFLEMNSLKTEDTAVYYCTTGPSPTTMMVFDSWGQGTLVTVSS

SEQ ID NO: 3402 - protein, 14 aa, synthetic construct
  REGION 1..14: note = Synthetic
TTGPSPTTMMVFDS

SEQ ID NO: 3403 - protein, 108 aa, synthetic construct
  REGION 1..108: note = Synthetic
SYVLTQPPSVSVSPGQTARITCSGDALPEKYASWFQRRSGQAPVLVIYEDTKRPSGIPEKFSGSSSGTMATLTISGAQVEDEADYYCYSTDSSGNQWVFGGGTKLTVL

SEQ ID NO: 3404 - protein, 11 aa, synthetic construct
  REGION 1..11: note = Synthetic
YSTDSSGNQWV

SEQ ID NO: 3405 - protein, 119 aa, synthetic construct
  REGION 1..119: note = Synthetic
QVQLQQWGAGLLKPSETLSLTCAVSGGSFSGYYWSWIRQSPGKGLEWIGEITYSGSANNNPSLKSRVTISVDTSKNQFSLKLISVTTADAAVYYCARGGWFLQVGLDVWGQGTTVTVSS

SEQ ID NO: 3406 - protein, 13 aa, synthetic construct
  REGION 1..13: note = Synthetic
ARGGWFLQVGLDV

SEQ ID NO: 3407 - protein, 107 aa, synthetic construct
  REGION 1..107: note = Synthetic
DIQMTQSPSSLSASVGDRVTITCRASHGINRWLAWYQQKPGQAPTLLITAASNLQSGVPSRFSGSGSGTDFTLTISSLQPEDFATYYCHQANNLPQTFGQGTKVEIK

SEQ ID NO: 3408 - protein, 9 aa, synthetic construct
  REGION 1..9: note = Synthetic
HQANNLPQT

SEQ ID NO: 3409 - protein, 121 aa, synthetic construct; identical to SEQ ID NO: 293
  REGION 1..121: note = Synthetic

SEQ ID NO: 3410 - protein, 14 aa, synthetic construct
  REGION 1..14: note = Synthetic
GTHYAVAGRRLVDY

SEQ ID NO: 3411 - protein, 109 aa, synthetic construct; identical to SEQ ID NO: 294
  REGION 1..109: note = Synthetic

SEQ ID NO: 3412 - protein, 11 aa, synthetic construct
  REGION 1..11: note = Synthetic
GTWDSSLNIGV

SEQ ID NO: 3413 - protein, 118 aa, synthetic construct; identical to SEQ ID NO: 319
  REGION 1..118: note = Synthetic

SEQ ID NO: 3414 - protein, 12 aa, synthetic construct
  REGION 1..12: note = Synthetic
ARDRLVATGFDH

SEQ ID NO: 3415 - protein, 110 aa, synthetic construct
  REGION 1..110: note = Synthetic
QSVLTQPASVSGSPGQSITISCTGTSSDVGSYNLVSWYQQHPGKAPKLMIYEAVKRPSGVSNRFSGSKSGNTATLTISGLQAEDEADYYCYSYAGSSTRVFGTGTKVTVL

SEQ ID NO: 3416 - protein, 10 aa, synthetic construct
  REGION 1..10: note = Synthetic
YSYAGSSTRV

SEQ ID NO: 3417 - protein, 121 aa, synthetic construct
  REGION 1..121: note = Synthetic
QVQLVQSGAEVKKPGASVKVSCKVSGYTLTELSMHWVRQAPGKGLEWMGGFDPEDAATFYAQKFQGRLTMTEDTATDTAYMELSSLTSEDTAVYYCGTHYAAAGRGLVDFWGLGTLVTVSS

SEQ ID NO: 3418 - protein, 14 aa, synthetic construct
  REGION 1..14: note = Synthetic
GTHYAAAGRGLVDF

SEQ ID NO: 3419 - protein, 110 aa, synthetic construct
  REGION 1..110: note = Synthetic
QSVLTQPPSVSAAPGQKVTISCSGSRSNIGNNYVSWYQQLPGTAPTLLIYENNKRPSRIPDRFSGSKSGTSATLGITGLQTGDEADYYCGTWDSSLSAGVFGGGTKLTVL

SEQ ID NO: 3420 - protein, 11 aa, synthetic construct
  REGION 1..11: note = Synthetic
GTWDSSLSAGV

SEQ ID NO: 3421 - protein, 128 aa, synthetic construct; identical to SEQ ID NO: 303
  REGION 1..128: note = Synthetic

SEQ ID NO: 3422 - protein, 21 aa, synthetic construct
  REGION 1..21: note = Synthetic
ARDLLTVLMAHTIPARSWFDS

SEQ ID NO: 3423 - protein, 107 aa, synthetic construct; identical to SEQ ID NO: 304
  REGION 1..107: note = Synthetic

SEQ ID NO: 3424 - protein, 9 aa, synthetic construct
  REGION 1..9: note = Synthetic
QQYKSNEDT

SEQ ID NO: 3425 - protein, 126 aa, synthetic construct; identical to SEQ ID NO: 323
  REGION 1..126: note = Synthetic

SEQ ID NO: 3426 - protein, 17 aa, synthetic construct
  REGION 1..17: note = Synthetic
TVDGLGATWYYYFAMDV

SEQ ID NO: 3427 - protein, 110 aa, synthetic construct
  REGION 1..110: note = Synthetic
QFVLTQEPSLTVSPGGTVTLTCASSTGAVTSGHYPYWFQQKPGQAPRTLIYDTNNKHSWTPARFSGSLLGGRAALTLSGAQPDDEADYYCLLSYSRARPVFGGGTKLTVL

SEQ ID NO: 3428 - protein, 10 aa, synthetic construct
  REGION 1..10: note = Synthetic
LLSYSRARPV

SEQ ID NO: 3429 - protein, 119 aa, synthetic construct
  REGION 1..119: note = Synthetic
QVQLQQWGAGLLKPSETLSLTCSVHGGTFSGYYWSWIRQPPGTGLEWIGDISHSGGTNYNPSLKSRVTISADTSKNQFSLKLSSVTAADTALYYCARGVAIFGHNFDLWGRGTLVTVSS

SEQ ID NO: 3430 - protein, 13 aa, synthetic construct
  REGION 1..13: note = Synthetic
ARGVAIFGHNFDL

SEQ ID NO: 3431 - protein, 106 aa, synthetic construct
  REGION 1..106: note = Synthetic
DIQMTQSPSSVSASVGDRVTITCRASQGVSRSLVWYQQKPGKAPKLLIYAASSLQSGVPSRFSGSGSGTEFTLTISSLQSEDFATYYCQQARFLPYTFGQGTKLEI

SEQ ID NO: 3432 - protein, 9 aa, synthetic construct
  REGION 1..9: note = Synthetic
QQARFLPYT

SEQ ID NO: 3433 - protein, 130 aa, synthetic construct
  REGION 1..130: note = Synthetic
EVQLVESGGGLVKPGGSLRLSCVASTFTFSNYYMNWVRQSPGRGLEGVSSISSRSNYIYYVDSVKGRFTISRDNAKNSLYLQMNSLRAEDTAVYYCARGNHGPGSYYRLGDYYYYGMDVWGQGTTVTVSS

SEQ ID NO: 3434 - protein, 23 aa, synthetic construct
  REGION 1..23: note = Synthetic
ARGNHGPGSYYRLGDYYYYGMDV

SEQ ID NO: 3435 - protein, 108 aa, synthetic construct; identical to SEQ ID NO: 306
  REGION 1..108: note = Synthetic

SEQ ID NO: 3436 - protein, 10 aa, synthetic construct
  REGION 1..10: note = Synthetic
QQYHNWPPWT

SEQ ID NO: 3437 - protein, 119 aa, synthetic construct
  REGION 1..119: note = Synthetic
QVQLQQWGAGLLKPSETLSLTCGVSGGSFIGYYWSWIRQPPGQGLEWIGEIDRSGGTSYNPSLKSRVTMSVDTSKNHFSLKLTSVTAADTAVYYCARGIAVTGTHFDSWGQGTLVTVSS

SEQ ID NO: 3438 - protein, 13 aa, synthetic construct
  REGION 1..13: note = Synthetic
ARGIAVTGTHFDS

SEQ ID NO: 3439 - protein, 106 aa, synthetic construct
  REGION 1..106: note = Synthetic
DIQMTQSPSSVSASVGDRVTISCRASQPITSYLAWYQHKPGKAPKLLIYAASSLQSGVPSRFSGSGSGTDFTLTISSLQPEDFATYYCQQGRFLPWTFGQGTKVEI

SEQ ID NO: 3440 - protein, 9 aa, synthetic construct
  REGION 1..9: note = Synthetic
QQGRFLPWT

SEQ ID NO: 3441 - protein, 132 aa, synthetic construct
  REGION 1..132: note = Synthetic
QVQLVESGGGVAQPGRSLRLSCAASGFTFSNYGMHWVRQAPGRGLEWVAVISYDGTNKHYADSVKGRFTISRDNSKNTLYLQMNSLRAEDTAVYYCAKLDAGHFWYYYERSGYAFSQWPDYWGQGTLVTVSS

SEQ ID NO: 3442 - protein, 25 aa, synthetic construct
  REGION 1..25: note = Synthetic
AKLDAGHFWYYYERSGYAFSQWPDY

SEQ ID NO: 3443 - protein, 113 aa, synthetic construct
  REGION 1..113: note = Synthetic
DIVMTQSPXXLPVTPGEPASISCRSSQSLLHSNGYNYLDWYLQKPGQSPQLLIYLGSNRASGVPDRFSGSGSGTDFTLKISRVEAEDVGVYYCMQALQTPPWTFGQGTKLEIK

SEQ ID NO: 3444 - protein, 10 aa, synthetic construct
  REGION 1..10: note = Synthetic
MQALQTPPWT

SEQ ID NO: 3445 - protein, 123 aa, synthetic construct; identical to SEQ ID NO: 299
  REGION 1..123: note = Synthetic

SEQ ID NO: 3446 - protein, 15 aa, synthetic construct
  REGION 1..15: note = Synthetic
ATYIRGYSVDEGFDP

SEQ ID NO: 3447 - protein, 107 aa, synthetic construct; identical to SEQ ID NO: 300
  REGION 1..107: note = Synthetic

SEQ ID NO: 3448 - protein, 9 aa, synthetic construct
  REGION 1..9: note = Synthetic
LQYNSYPIT

SEQ ID NO: 3449 - protein, 123 aa, synthetic construct
  REGION 1..123: note = Synthetic
QVQLVQSGAEVKKPGASVKVSCKASGYTFTNYYIHWVRQAPGQGLEWMGIINPSGGSTTYAQKFQGRVTMTRDTSMSTVYMELSSLRSEDTAVYYCARDLGIVVVPADPLGYWGQGTLVTVSS

SEQ ID NO: 3450 - protein, 16 aa, synthetic construct
  REGION 1..16: note = Synthetic
ARDLGIVVVPADPLGY

SEQ ID NO: 3451 - protein, 109 aa, synthetic construct
  REGION 1..109: note = Synthetic
EIVLTQSPATLSLSPGERATLSCRASQSVSNYFTWYQQKPGQAPRLLIYDGSNRATGIPARFSGSGSGTDFTLTISSLEPEDFAVYYCQQRSNWPPELTFGGGTRVEIK

SEQ ID NO: 3452 - protein, 11 aa, synthetic construct
  REGION 1..11: note = Synthetic
QQRSNWPPELT

SEQ ID NO: 3453 - protein, 128 aa, synthetic construct; identical to SEQ ID NO: 297
  REGION 1..128: note = Synthetic

SEQ ID NO: 3454 - protein, 21 aa, synthetic construct
  REGION 1..21: note = Synthetic
AAAFAVAGTKEDYSYYYGMDV

SEQ ID NO: 3455 - protein, 106 aa, synthetic construct; identical to SEQ ID NO: 298
  REGION 1..106: note = Synthetic

SEQ ID NO: 3456 - protein, 9 aa, synthetic construct
  REGION 1..9: note = Synthetic
QQYNSYPRT

SEQ ID NO: 3457 - protein, 128 aa, synthetic construct
  REGION 1..128: note = Synthetic
QVQLVESGGGVVQPGRSLRLSCAASGFSFSNYAMHWIRQAPGKGLESLTVISYDGSDESYADSVKGRFTISRDNSKNTLYLQMNSLRADDTAVYFCARDAARDYDSSGYLSSYYFDYWGQGTLVTVSS

SEQ ID NO: 3458 - protein, 21 aa, synthetic construct
  REGION 1..21: note = Synthetic
ARDAARDYDSSGYLSSYYFDY

SEQ ID NO: 3459 - protein, 107 aa, synthetic construct
  REGION 1..107: note = Synthetic
DIQMTQSPSTLSASVGDRVTITCRASQNINNWLAWYQQKPGKAPKLLIYQASTLETGVPSRFSGSGSGTEFTLTISSLQPDDFATYFCQQYNTYPLTFGGGTKVEIK

SEQ ID NO: 3460 - protein, 9 aa, synthetic construct
  REGION 1..9: note = Synthetic
QQYNTYPLT

SEQ ID NO: 3461 - protein, 122 aa, synthetic construct
  REGION 1..122: note = Synthetic
QVQLQESGPGLVKPSQTLSLICAVSGGSISSNDYYWSWVRQPPGKGLEWMGNIFYSGITYYNPSLNSRLTMSVDTSKNQFYLKLSSVTAADTAIYFCARYVVNYSRDDGFDIWGQGTTVTVS

SEQ ID NO: 3462 - protein, 15 aa, synthetic construct
  REGION 1..15: note = Synthetic
ARYVVNYSRDDGFDI

SEQ ID NO: 3463 - protein, 107 aa, synthetic construct; identical to SEQ ID NO: 314
  REGION 1..107: note = Synthetic

SEQ ID NO: 3464 - protein, 9 aa, synthetic construct
  REGION 1..9: note = Synthetic
LQYNTYPIT

SEQ ID NO: 3465 - protein, 122 aa, synthetic construct
  REGION 1..122: note = Synthetic
QVQLQESGPGLVKPSQTLSLTCTVSGGSISSGGYYWSWIRQHPGKGLEWIGYIYSSGTTYFNPSLKSRPTISIDTSKNQFSLKLNSVTAADTALYFCARTATAQARWYFDLWGRGTLLTVSS

SEQ ID NO: 3466 - protein, 14 aa, synthetic construct
  REGION 1..14: note = Synthetic
ARTATAQARWYFDL

SEQ ID NO: 3467 - protein, 110 aa, synthetic construct
  REGION 1..110: note = Synthetic
QSVLTQPRSVSGSPGQSVTISCTGTRSDVGGYNYFSWYQQHPGKAPRLLIYDVNKRPSGVPDRFSGSKSGNTASLTISGLQSDDEGDYYCCSYVVTYTWIFGGGTKLTVL

SEQ ID NO: 3468 - protein, 10 aa, synthetic construct
  REGION 1..10: note = Synthetic
CSYVVTYTWI

SEQ ID NO: 3469 - protein, 123 aa, synthetic construct
  REGION 1..123: note = Synthetic
QVQLVQSGAEVKKPGSSVKVSCKASGDTFSNYGITWVRQAPGQGLEWMGAIVPMFGARNYAQKFQGRVTITADTSTTTAYMELSSLKSEDTAVYYCARVVVPVPVRYNWFDPWGQGTLVTVSS

SEQ ID NO: 3470 - protein, 16 aa, synthetic construct
  REGION 1..16: note = Synthetic
ARVVVPVPVRYNWFDP

SEQ ID NO: 3471 - protein, 106 aa, synthetic construct
  REGION 1..106: note = Synthetic
EIVMTQSPATLSVSPGERATLSCRASQSVSSNLAWYQQNPGQAPRLLIFGASTRATGIPARFSGSGSGTEFTLTISSLQSEDFGVYYCHQYNNWPQSFGQGTKLEI

SEQ ID NO: 3472 - protein, 9 aa, synthetic construct
  REGION 1..9: note = Synthetic
HQYNNWPQS

SEQ ID NO: 3473 - protein, 119 aa, synthetic construct
  REGION 1..119: note = Synthetic
QVQLQQWGAGLLKPSETLSLICAVYGGSFSGYYWTWIRQPPGKGLEWIGEINHSGSTNYNPSLKSRVTISVDTSKNQFSLKLNSVTAADTALYYCVRGGGYSYGGLDYWGQGTLVTVSS

SEQ ID NO: 3474 - protein, 13 aa, synthetic construct
  REGION 1..13: note = Synthetic
VRGGGYSYGGLDY

SEQ ID NO: 3475 - protein, 111 aa, synthetic construct
  REGION 1..111: note = Synthetic
QSVLTQPPSASGAPGQRVTISCSGSGSNIGVNHVYWYQQLPATAPKLLIYRNNHRPSGVPDRFSGSKSGTSASLAISGLRSEDEADYYCAAWDDSLSVHYVFGTGTKVTVL

SEQ ID NO: 3476 - protein, 12 aa, synthetic construct
  REGION 1..12: note = Synthetic
AAWDDSLSVHYV

SEQ ID NO: 3477 - protein, 119 aa, synthetic construct; identical to SEQ ID NO: 317
  REGION 1..119: note = Synthetic

SEQ ID NO: 3478 - protein, 12 aa, synthetic construct
  REGION 1..12: note = Synthetic
ARRYYGSGSFDY

SEQ ID NO: 3479 - protein, 110 aa, synthetic construct
  REGION 1..110: note = Synthetic
QSVLTQPASVSGSPGQSITISCTGTTSDVGSYNLVSWYQQHPGKAPKLLIYEGSKRPSGVSNRFSGSKSGNTASLTISGLQAEDEADYYCFSYAGFSTWVFGGGTKLTVL

SEQ ID NO: 3480 - protein, 10 aa, synthetic construct
  REGION 1..10: note = Synthetic
FSYAGFSTWV

SEQ ID NO: 3481 - protein, 125 aa, synthetic construct
  REGION 1..125: note = Synthetic
QVQLVQSGAEVKKPGASVKVSCKTSGYTFATYYMHWVRLAPGQGLEWMGVINPGDGSASLAQKFQGRVTMTRDTSTRTLYMELSSLRSEDTAMYFCARDLTATTNYDYYYTMDVWGQGTTVTVSS

SEQ ID NO: 3482 - protein, 18 aa, synthetic construct
  REGION 1..18: note = Synthetic
ARDLTATTNYDYYYTMDV

SEQ ID NO: 3483 - protein, 108 aa, synthetic construct
  REGION 1..108: note = Synthetic
SYVLTQPPSVSVSPGQTARITCSGDALPKQFASWYQQKPGQAPVAVIYKDTERPSGIPERFSGSSSGTTVTLTISGVQPEDEADYYCQSADSSGTYVIFGGGTKLTVL

SEQ ID NO: 3484 - protein, 11 aa, synthetic construct
  REGION 1..11: note = Synthetic
QSADSSGTYVI

SEQ ID NO: 3485 - protein, 125 aa, synthetic construct
  REGION 1..125: note = Synthetic
EVQLVESGGGLVQPGGSLRLSCAASGFIVSSNYMSWVRQAPGKGLEWVSIIYSDGSTFYADAVKGRFTISRDTSKNTLFLQMNSLRAEDTAVYYCARDPLAAAVIRPVTDAIDIWGQGTMVTVSS

SEQ ID NO: 3486 - protein, 19 aa, synthetic construct
  REGION 1..19: note = Synthetic
ARDPLAAAVIRPVTDAIDI

SEQ ID NO: 3487 - protein, 108 aa, synthetic construct
  REGION 1..108: note = Synthetic
EIVLTQSPGTLSLSPGERATLSCRASQSISSNYFAWYQQKPGQAPRLLIYGASSRATGIPDRFSGSGSGTDFTLTISRLEPEDFAVYYCQQYRYSQWTFGQGTKVEIK

SEQ ID NO: 3488 - protein, 9 aa, synthetic construct
  REGION 1..9: note = Synthetic
QQYRYSQWT

SEQ ID NO: 3489 - protein, 126 aa, synthetic construct
  REGION 1..126: note = Synthetic
EVQLVESGGGLVKPGGSLRLSCAGSGLILRNAWMSWVRQAPGKRLEWVGRIMNKVDGGATDYAAPVKGRFTISRDESKNTLFLEMDSLKTEDTAVYFCTTEGMTTVRLLGVAAFDIWGQGTMVTVS

SEQ ID NO: 3490 - protein, 18 aa, synthetic construct
  REGION 1..18: note = Synthetic
TTEGMTTVRLLGVAAFDI

SEQ ID NO: 3491 - protein, 109 aa, synthetic construct
  REGION 1..109: note = Synthetic
QSVLTQPASVSGSPGQSITISCTGTSSDVGGYNFVSWYQQHPGKAPRLLIYDVSNRPSGVSNRFSGSKSGDTASLTISGLQAEDEAHYYCGSYTRSSTLFGGGTKLTVL

SEQ ID NO: 3492 - protein, 9 aa, synthetic construct
  REGION 1..9: note = Synthetic
GSYTRSSTL

SEQ ID NO: 3493 - protein, 122 aa, synthetic construct; identical to SEQ ID NO: 1
  REGION 1..122: note = Synthetic

SEQ ID NO: 3494 - protein, 15 aa, synthetic construct
  REGION 1..15: note = Synthetic
ATGYAYCGGDCLIDY

SEQ ID NO: 3495 - protein, 108 aa, synthetic construct
  REGION 1..108: note = Synthetic
QFVLTQPPSASGTPGQRVTISCSGSSSNIGSNYVYWYQQLPGTAPKLLIYRNNQRPSGVPDRFSGSKSGTSASLAISGLRSEDEADYYCAAWDDSPVVFGGGTKLTVL

SEQ ID NO: 3496 - protein, 9 aa, synthetic construct
  REGION 1..9: note = Synthetic
AAWDDSPVV

SEQ ID NO: 3497 - protein, 121 aa, synthetic construct; identical to SEQ ID NO: 19
  REGION 1..121: note = Synthetic

SEQ ID NO: 3498 - protein, 14 aa, synthetic construct
  REGION 1..14: note = Synthetic
AAGPAVIRGGWFDP

SEQ ID NO: 3499 - protein, 110 aa, synthetic construct
  REGION 1..110: note = Synthetic
QFVLTQPASVSGSPGQSITISCTGTSSDVGSYNLASWYRQHPGKAPKLMIYEGSKRPSGVSNRFSGSKSGNTASLTISGLQAEDEADYFCCSYAGSGTWVFGGGTKLTVL

SEQ ID NO: 3500 - protein, 10 aa, synthetic construct
  REGION 1..10: note = Synthetic
CSYAGSGTWV

SEQ ID NO: 3501 - protein, 128 aa, synthetic construct
  REGION 1..128: note = Synthetic
QVQLVESGGGVVQPGRSLRLSCAASGFTFSTYGMHWVRQAPGKGLEWVAVIWYDGNNKYYADSVKGRFTISRDNSKNTLYLQMNSLRAEDTAVYYCARDGTDYYDFWSGYYGQWFDPWGQGTLVTVSS

SEQ ID NO: 3502 - protein, 21 aa, synthetic construct
  REGION 1..21: note = Synthetic
ARDGTDYYDFWSGYYGQWFDP

SEQ ID NO: 3503 - protein, 109 aa, synthetic construct
  REGION 1..109: note = Synthetic
QSALTQPPSASGSPGQSVTISCTGTSSDVGGYNYVSWYQQHPGKAPKLMIYEVSKRPSGVPDRFSGSKSGNTASLTVSGLQAEDEADYYCSSYAAYTRVFGTGTKVTVL

SEQ ID NO: 3504 - protein, 9 aa, synthetic construct
  REGION 1..9: note = Synthetic
SSYAAYTRV

SEQ ID NO: 3505 - protein, 122 aa, synthetic construct
  REGION 1..122: note = Synthetic
QVQLVQSGAEVKKPGASVKVSCKVSEYTLPELSIHWVRQAPGKGLEWMGGFDPEDGETIYAQKFQGRVAMTEDTSTDTAYMELTSLRSEDTAVYYCTTGSPITGTTGWFHPWGQGTLVTVSS

SEQ ID NO: 3506 - protein, 15 aa, synthetic construct
  REGION 1..15: note = Synthetic
TTGSPITGTTGWFHP

SEQ ID NO: 3507 - protein, 109 aa, synthetic construct
  REGION 1..109: note = Synthetic
SYVLTQPPSVSVAPGKTARISCGGSNIGSKSVHWYQQKPGQAPVLVVYDDSDRPSGIPERFSGSNSGNTATLTISRVEAGDEADYYCQVWDSSSDHPWVFGGGTKLTVL

SEQ ID NO: 3508 - protein, 12 aa, synthetic construct
  REGION 1..12: note = Synthetic
QVWDSSSDHPWV

SEQ ID NO: 3509 - protein, 122 aa, synthetic construct; identical to SEQ ID NO: 1
  REGION 1..122: note = Synthetic

SEQ ID NO: 3510 - protein, 15 aa, synthetic construct
  REGION 1..15: note = Synthetic
ATGYAYCGGDCLIDY

SEQ ID NO: 3511 - protein, 108 aa, synthetic construct; identical to SEQ ID NO: 3495
  REGION 1..108: note = Synthetic

SEQ ID NO: 3512 - protein, 9 aa, synthetic construct
  REGION 1..9: note = Synthetic
AAWDDSPVV

SEQ ID NO: 3513 - protein, 128 aa, synthetic construct
  REGION 1..128: note = Synthetic
EVQLVESGGGLVKPGGSLRLSCAASGFTFSSYTMNWVRQAPGKGLEWVSSISSSSSYIYYADSVKGRFTISRDNAKNSLYLQMNSLRAEDTAVYYCASDPGFGVAIIPDYYYYGMDVWGQGTTVTVSS

SEQ ID NO: 3514 - protein, 21 aa, synthetic construct
  REGION 1..21: note = Synthetic
ASDPGFGVAIIPDYYYYGMDV

SEQ ID NO: 3515 - protein, 108 aa, synthetic construct
  REGION 1..108: note = Synthetic
SYVLTQPPSVSVAPGQTARITCGGNNIRSKSVHWYQQKPGQAPVLVVYDNSDRPSGIPERFSGSNSGNTATLTISRVEAGDEADYYCQVWDSSSDHQVFGGGTKLTVL

SEQ ID NO: 3516 - protein, 11 aa, synthetic construct
  REGION 1..11: note = Synthetic
QVWDSSSDHQV

SEQ ID NO: 3517 - protein, 122 aa, synthetic construct
  REGION 1..122: note = Synthetic
QVQLQESGPGLVKPSETLSLTCTVSGGSISSYYWSWIRQPPGKGLEWIGYIYNIGSTNYNPSLKSRVTISVDTSKNQFSLKLSSVTAADTAVYFCARASSSWYPYYYGMDVWGQGTTVTVSS

SEQ ID NO: 3518 - protein, 16 aa, synthetic construct
  REGION 1..16: note = Synthetic
ARASSSWYPYYYGMDV

SEQ ID NO: 3519 - protein, 111 aa, synthetic construct
  REGION 1..111: note = Synthetic
QFVLTQPPSVSGAPGQRVTISCTGSSSNIGAGYYVHWYQQLPGTAPKLLIYCNSNRPSGVPDRFSGSKSGTSASLAITGLQAEDEADYYCQSYDSSLSGGVFGGGTKLTVL

SEQ ID NO: 3520 - protein, 11 aa, synthetic construct
  REGION 1..11: note = Synthetic
QSYDSSLSGGV

SEQ ID NO: 3521 - protein, 122 aa, synthetic construct; identical to SEQ ID NO: 1
  REGION 1..122: note = Synthetic

SEQ ID NO: 3522 - protein, 15 aa, synthetic construct
  REGION 1..15: note = Synthetic
ATGYAYCGGDCLIDY

SEQ ID NO: 3523 - protein, 108 aa, synthetic construct; identical to SEQ ID NO: 3495
  REGION 1..108: note = Synthetic

SEQ ID NO: 3524 - protein, 9 aa, synthetic construct
  REGION 1..9: note = Synthetic
AAWDDSPVV

SEQ ID NO: 3525 - protein, 130 aa, synthetic construct; identical to SEQ ID NO: 15
  REGION 1..130: note = Synthetic

SEQ ID NO: 3526 - protein, 23 aa, synthetic construct
  REGION 1..23: note = Synthetic
ARALTRSYYYGSGSYYYNNWFDP

SEQ ID NO: 3527 - protein, 111 aa, synthetic construct
  REGION 1..111: note = Synthetic
QFVLTQPASVSGSPGQSITISCTGTSSDVGGYNYVSWYQQHPGKAPKLMIYDVTNRPSGVSNRFSASKSGNTASLTISGLQAEDEADYYCSSYTSSSTLWVFGGGTKLTVL

SEQ ID NO: 3528 - protein, 11 aa, synthetic construct
  REGION 1..11: note = Synthetic
SSYTSSSTLWV

SEQ ID NO: 3529 - protein, 129 aa, synthetic construct
  REGION 1..129: note = Synthetic
QVQLVESGGGVVQPGRSLRLSCAASGFTFSSYGMHWVRQAPGKGLEWVAVIWYDGSNKYYADSVKGRFTISRDNSKNTLYLQMNSLRAEDTAVYYCARDSPMGQLATSGLLYSEGLDYWGQGTLVTVSS

SEQ ID NO: 3530 - protein, 22 aa, synthetic construct
  REGION 1..22: note = Synthetic
ARDSPMGQLATSGLLYSEGLDY

SEQ ID NO: 3531 - protein, 107 aa, synthetic construct
  REGION 1..107: note = Synthetic
SYVLTQPPSMSVSPGQTARITCSGDALPKQYAYWYQQKPGQAPVLVIYKDSERPSGIPERFSGSSSGTTVTLTISGVQAEDEADYYCQSADSSGTWVFGGGTKLTVL

SEQ ID NO: 3532 - protein, 10 aa, synthetic construct
  REGION 1..10: note = Synthetic
QSADSSGTWV

SEQ ID NO: 3533 - protein, 123 aa, synthetic construct
  REGION 1..123: note = Synthetic
QVQLVQSGAEVKKPGASVKVSCKVSGYTLPELAMHWVRQAPGKGLEWMGGFDPEDGETIYAQKFQGRVIMTEDTSTDTAYMELSSLRSEDTAVYYCVTGPPITSIPINWLDPWGQGTLVTVSS

SEQ ID NO: 3534 - protein, 16 aa, synthetic construct
  REGION 1..16: note = Synthetic
VTGPPITSIPINWLDP

SEQ ID NO: 3535 - protein, 110 aa, synthetic construct
  REGION 1..110: note = Synthetic
QFVLTQPPSVSAAPGQKVTISCSGSSSNIGKNYVSWYQQLPGTAPKLLIYENNERPSGIPDRFSGSKSGTSATLGITGLQTGDEADYYCGTWDSSLSAGVFGGGTKLTVL

SEQ ID NO: 3536 - protein, 11 aa, synthetic construct
  REGION 1..11: note = Synthetic
GTWDSSLSAGV

SEQ ID NO: 3537 - protein, 122 aa, synthetic construct; identical to SEQ ID NO: 1
  REGION 1..122: note = Synthetic

SEQ ID NO: 3538 - protein, 15 aa, synthetic construct
  REGION 1..15: note = Synthetic
ATGYAYCGGDCLIDY

SEQ ID NO: 3539 - protein, 108 aa, synthetic construct; identical to SEQ ID NO: 3495
  REGION 1..108: note = Synthetic

SEQ ID NO: 3540 - protein, 9 aa, synthetic construct
  REGION 1..9: note = Synthetic
AAWDDSPVV

SEQ ID NO: 3541 - protein, 122 aa, synthetic construct
  REGION 1..122: note = Synthetic
QVQLVESGGGVVQPGRSLRLSCAASGFTFSSYGMHWVRQAPGKGLEWVALIWYDGSNKYYADSVKGRFTISRDNSKNTVYLQMNSLRAEDTAVYYCARDQHGDYWYDYFDYWGQGTLVTVSS

SEQ ID NO: 3542 - protein, 15 aa, synthetic construct
  REGION 1..15: note = Synthetic
ARDQHGDYWYDYFDY

SEQ ID NO: 3543 - protein, 108 aa, synthetic construct
  REGION 1..108: note = Synthetic
SYVLTQPPSVSVSPGQTARITCSGDALPKKYAYWYQQKSGQAPVLVIYEDSKRPSGIPERFSGSSSGTMATLTISGAQVEDEADYYCYSTDSSGNHRVFGTGTKVTVL

SEQ ID NO: 3544 - protein, 11 aa, synthetic construct
  REGION 1..11: note = Synthetic
YSTDSSGNHRV

SEQ ID NO: 3545 - protein, 126 aa, synthetic construct; identical to SEQ ID NO: 29
  REGION 1..126: note = Synthetic

SEQ ID NO: 3546 - protein, 19 aa, synthetic construct
  REGION 1..19: note = Synthetic
ATSPPYCSNGVCYTHWFDP

SEQ ID NO: 3547 - protein, 109 aa, synthetic construct
  REGION 1..109: note = Synthetic
QFVLTQPPSVSAAPGQKVTISCSGSSSNIGNNYVSWYQQLPGTAPKLLIYENNKRPSGIPDRFSGSKSGTSATLGITGLQTGDEADYYCGTWDSSLSAVFGTGTKVTVL

SEQ ID NO: 3548 - protein, 10 aa, synthetic construct
  REGION 1..10: note = Synthetic
GTWDSSLSAV

SEQ ID NO: 3549 - protein, 122 aa, synthetic construct; identical to SEQ ID NO: 1
  REGION 1..122: note = Synthetic

SEQ ID NO: 3550 - protein, 15 aa, synthetic construct
  REGION 1..15: note = Synthetic
ATGYAYCGGDCLIDY

SEQ ID NO: 3551 - protein, 108 aa, synthetic construct; identical to SEQ ID NO: 3495
  REGION 1..108: note = Synthetic

SEQ ID NO: 3552 - protein, 9 aa, synthetic construct
  REGION 1..9: note = Synthetic
AAWDDSPVV

SEQ ID NO: 3553 - protein, 121 aa, synthetic construct
  REGION 1..121: note = Synthetic
QVQLVQSGAEVKKPGASVKVSCKVSGYTLTELSMHWVRQAPGKGLEWMGGFDPEDGETIQAQKFQGRVTMTEDTSTDTAYMELSSLRSEDTAVYYCAIAPATVTTGWFDPWGQGTLVTVSS

SEQ ID NO: 3554 - protein, 14 aa, synthetic construct
  REGION 1..14: note = Synthetic
AIAPATVTTGWFDP

SEQ ID NO: 3555 - protein, 111 aa, synthetic construct
  REGION 1..111: note = Synthetic
QFVLTQPPSASGSPGQSVTISCTGTSSDVGGYNYVSWYQQHPGKAPKLMIYEVSKRPSGVPDRFSGSKSGNTASLTVSGLQAEDEADYYCSSYAGSNNLRVFGGGTKLTVL

SEQ ID NO: 3556 - protein, 11 aa, synthetic construct
  REGION 1..11: note = Synthetic
SSYAGSNNLRV

SEQ ID NO: 3557 - protein, 121 aa, synthetic construct; identical to SEQ ID NO: 3
  REGION 1..121: note = Synthetic

SEQ ID NO: 3558 - protein, 14 aa, synthetic construct
  REGION 1..14: note = Synthetic
ATAPAITISGWLDP

SEQ ID NO: 3559 - protein, 111 aa, synthetic construct
  REGION 1..111: note = Synthetic
QFVLTQPPSASGSPGQSVTISCTGTSSDVGGYNYVSWYQQHPGKAPKLMIYEVSQRPSGVPDRFSGSKSGNTASLTVSGLQAEDEADYYCSSYAGSNNYVVFGGGTKLTVL

SEQ ID NO: 3560 - protein, 11 aa, synthetic construct
  REGION 1..11: note = Synthetic
SSYAGSNNYVV

SEQ ID NO: 3561 - protein, 122 aa, synthetic construct; identical to SEQ ID NO: 5
  REGION 1..122: note = Synthetic

SEQ ID NO: 3562 - protein, 15 aa, synthetic construct
  REGION 1..15: note = Synthetic
TAGPAYSSGWFPPWY

SEQ ID NO: 3563 - protein, 111 aa, synthetic construct
  REGION 1..111: note = Synthetic
QSVLTQPPSVSAAPGQKVTISCSGSSSNIGNNYVSWYQQLPGTAPKLLIYENNKRPSGIPDRFSGSKFGTSATLGITGLQRGEEADYYCGTWDSSLSAGGVFGGGTKLTVL

SEQ ID NO: 3564 - protein, 12 aa, synthetic construct
  REGION 1..12: note = Synthetic
GTWDSSLSAGGV

SEQ ID NO: 3565 - protein, 122 aa, synthetic construct; identical to SEQ ID NO: 1
  REGION 1..122: note = Synthetic

SEQ ID NO: 3566 - protein, 15 aa, synthetic construct
  REGION 1..15: note = Synthetic
ATGYAYCGGDCLIDY

SEQ ID NO: 3567 - protein, 108 aa, synthetic construct; identical to SEQ ID NO: 3495
  REGION 1..108: note = Synthetic

SEQ ID NO: 3568 - protein, 9 aa, synthetic construct
  REGION 1..9: note = Synthetic
AAWDDSPVV

SEQ ID NO: 3569 - protein, 129 aa, synthetic construct; identical to SEQ ID NO: 3529
  REGION 1..129: note = Synthetic

SEQ ID NO: 3570 - protein, 22 aa, synthetic construct
  REGION 1..22: note = Synthetic
ARDSPMGQLATSGLLYSEGLDY

SEQ ID NO: 3571 - protein, 107 aa, synthetic construct
  REGION 1..107: note = Synthetic
SYVLTQPPSVSVSPGQTARITCSGDALPKQYAYWYQQKPGQAPVLVIYKDSERPSGIPERFSGSSSGTTVTLTISGVQAEDEADYYCQSADSSGTWVFGGGTKLTVL

SEQ ID NO: 3572 - protein, 10 aa, synthetic construct
  REGION 1..10: note = Synthetic
QSADSSGTWV

SEQ ID NO: 3573 - protein, 127 aa, synthetic construct; identical to SEQ ID NO: 7
  REGION 1..127: note = Synthetic

SEQ ID NO: 3574 - protein, 20 aa, synthetic construct
  REGION 1..20: note = Synthetic
AKVHGYNSSPGAFYYYGMDV

SEQ ID NO: 3575 - protein, 107 aa, synthetic construct
  REGION 1..107: note = Synthetic
SYVLTQPLSVSVALGQTARITCGGNNIGSKNVHWYQQKPGQAPVLVIYRDYNRPSGIPERFSGSNSGNTATLTISRAQAGDEADYYCQVWDSSSSVVFGGGTKLTVL

SEQ ID NO: 3576 - protein, 10 aa, synthetic construct
  REGION 1..10: note = Synthetic
QVWDSSSSVV

SEQ ID NO: 3577 - protein, 132 aa, synthetic construct; identical to SEQ ID NO: 21
  REGION 1..132: note = Synthetic

SEQ ID NO: 3578 - protein, 25 aa, synthetic construct
  REGION 1..25: note = Synthetic
ATDLPYCSGDCYPTEVPKYSYGMDV

SEQ ID NO: 3579 - protein, 108 aa, synthetic construct
  REGION 1..108: note = Synthetic
QFVLTQPASVSGSPGQSITISCTGTSSDVGRYNLVSWYQQHPGKAPKLMIYEGSKRPSGVSNRFSGSKSGNTASLTISGLQAEDEADYYCCSYAGNWVFGGGTKLTVL

SEQ ID NO: 3580 - protein, 8 aa, synthetic construct
  REGION 1..8: note = Synthetic
CSYAGNWV

SEQ ID NO: 3581 - protein, 129 aa, synthetic construct; identical to SEQ ID NO: 3529
  REGION 1..129: note = Synthetic

SEQ ID NO: 3582 - protein, 22 aa, synthetic construct
  REGION 1..22: note = Synthetic
ARDSPMGQLATSGLLYSEGLDY

SEQ ID NO: 3583 - protein, 107 aa, synthetic construct; identical to SEQ ID NO: 3531
  REGION 1..107: note = Synthetic

SEQ ID NO: 3584 - protein, 10 aa, synthetic construct
  REGION 1..10: note = Synthetic
QSADSSGTWV

SEQ ID NO: 3585 - protein, 112 aa, synthetic construct
  REGION 1..112: note = Synthetic
QVQLVQSGAEVKKPGASVKVSCKVSGYTLTELSMYWVRQAPGKGLEWMGGFDPEDGETIYAQKFQGRVTMTEDTSTDTAYMELSSLRSEDTAVYYCATDGLWGQGXNGQRLF

SEQ ID NO: 3586 - protein, 5 aa, synthetic construct
  REGION 1..5: note = Synthetic
ATDGL

SEQ ID NO: 3587 - protein, 108 aa, synthetic construct
  REGION 1..108: note = Synthetic
SYVLTQPPSVSVSPGQTARITCSGDALPKKYAYWYQQKSGQAPVLVIYEDSKRPSGIPERFSGSSSGTMATLTISGAQVEDEADYYCYSTDSSGNHWVFGGGTKLTVL

SEQ ID NO: 3588 - protein, 11 aa, synthetic construct
  REGION 1..11: note = Synthetic
YSTDSSGNHWV

SEQ ID NO: 3589 - protein, 124 aa, synthetic construct
  REGION 1..124: note = Synthetic
QVQLQESGPGLVKPSETLSLTCAVSGYSISSGYYWGWIRQPPGKGLEWIGSIHHSGSTDYNPSLKSRVTISVDTSKNQFSLKLSSVTAADTAVYYCARALSGYYLFFIFYFDYWGQGTLVTVSS

SEQ ID NO: 3590 - protein, 17 aa, synthetic construct
  REGION 1..17: note = Synthetic
ARALSGYYLFFIFYFDY

SEQ ID NO: 3591 - protein, 110 aa, synthetic construct
  REGION 1..110: note = Synthetic
QFVLTQPASVSGSPGQSITISCTGTSSDVGGYNYVSWYQQHPGKAPKLMIYEVSNRPSGVSNRFSGSKSGNTASLTISGLQAEDEADYYCSSYTSSSFVVFGGGTKLTVL

SEQ ID NO: 3592 - protein, 10 aa, synthetic construct
  REGION 1..10: note = Synthetic
SSYTSSSFVV

SEQ ID NO: 3593 - protein, 121 aa, synthetic construct
  REGION 1..121: note = Synthetic
QVQLVQSGAEVKKPGASVKVSCKVSGYTLTELSMHWVRQAPGKGLEWMGGFDPEDGETIYAQKFQGRVTMTEDTSTDTAYMELSSLRSEDTAVYYCATAPAITIFGWFDPWGQGTLVTVSS

SEQ ID NO: 3594 - protein, 14 aa, synthetic construct
  REGION 1..14: note = Synthetic
ATAPAITIFGWFDP

SEQ ID NO: 3595 - protein, 111 aa, synthetic construct
  REGION 1..111: note = Synthetic
QFVLTQPPSASGSPGQSVTISCTGTSSDVGGYNYVSWYQQHPGKAPKLMIYEVSKRPSGVPDRFSGSKSGNTASLTVSGLQAEDEADYYCSSYAGSNNYVVFGGGTKLTVL

SEQ ID NO: 3596 - protein, 11 aa, synthetic construct
  REGION 1..11: note = Synthetic
SSYAGSNNYVV

SEQ ID NO: 3597 - protein, 122 aa, synthetic construct; identical to SEQ ID NO: 25
  REGION 1..122: note = Synthetic

SEQ ID NO: 3598 - protein, 13 aa, synthetic construct
  REGION 1..13: note = Synthetic
TRLDKWGLSYFDY

SEQ ID NO: 3599 - protein, 110 aa, synthetic construct
  REGION 1..110: note = Synthetic
QFVLTQPRSVSGSPGQSVTISCTGTSSDVGGYNSVSWYQQHPGAAPKLMIYDVNKRPSGVPDRFSGSKSGNTASLTISGLQAEDEVDYYCCSYAGSYSYVFGTGTKVTVL

SEQ ID NO: 3600 - protein, 10 aa, synthetic construct
  REGION 1..10: note = Synthetic
CSYAGSYSYV

SEQ ID NO: 3601 - protein, 122 aa, synthetic construct; identical to SEQ ID NO: 1
  REGION 1..122: note = Synthetic

SEQ ID NO: 3602 - protein, 15 aa, synthetic construct
  REGION 1..15: note = Synthetic
ATGYAYCGGDCLIDY

SEQ ID NO: 3603 - protein, 111 aa, synthetic construct
  REGION 1..111: note = Synthetic
QSVLTQPPSVSGAPGQRVTISCTGSSSNIGAGYDVHWYQQLPGTAPKLLIYGNINRPSGVPDRFSGSKSGTSASLAITGLQAEDEADYYCQSYDSSLSGWVFGGGTKLTVL

SEQ ID NO: 3604 - protein, 11 aa, synthetic construct
  REGION 1..11: note = Synthetic
QSYDSSLSGWV

SEQ ID NO: 3605 - protein, 124 aa, synthetic construct
  REGION 1..124: note = Synthetic
QVQLVESGGGVVQPGRSLRLSCAASGFTFISYGMHWVRQAPGKGLEWVAVISYDGSNKYYADSVKGRFTISRDNSKNTLYLQMNSLRAEDTAVYYCAGGVPEGYYYYYYGLDVWGQGTTVTVSS

SEQ ID NO: 3606 - protein, 17 aa, synthetic construct
  REGION 1..17: note = Synthetic
AGGVPEGYYYYYYGLDV

SEQ ID NO: 3607 - protein, 107 aa, synthetic construct
  REGION 1..107: note = Synthetic
DIQMTQSPSSLSASVGDRVTITCRASQSISNFLNWYQQKPGKAPKLLIYAASSFQSGVPSRFSGSGSGTDFTLTISSLQPEDFATYYCQQSYGTPVTFGQGTKVEIK

SEQ ID NO: 3608 - protein, 9 aa, synthetic construct
  REGION 1..9: note = Synthetic
QQSYGTPVT

SEQ ID NO: 3609 - protein, 124 aa, synthetic construct
  REGION 1..124: note = Synthetic
EVQLLESGGGLVQPGGSLRLSCAAPGFTFSSYAMNWVRQAPGKGLEWVSAISGSGNSKYYADSVKGRFTISRDNSKNTLYLQMNSLRAEDTAVYYCAKGLRFGELSTPGDFDYWGQGTLVAVSS

SEQ ID NO: 3610 - protein, 17 aa, synthetic construct
  REGION 1..17: note = Synthetic
AKGLRFGELSTPGDFDY

SEQ ID NO: 3611 - protein, 107 aa, synthetic construct
  REGION 1..107: note = Synthetic
AIQMTQSPSSLSASVGDRVTITCRASQGIRNDLGWYRQKPGKAPKLLIYAASSLQXGVPSRFSGSGSGTDFTLTISSLQPEDFATYYCLQDYNYPKTFGQGTKVEIK

SEQ ID NO: 3612 - protein, 9 aa, synthetic construct
  REGION 1..9: note = Synthetic
LQDYNYPKT

SEQ ID NO: 3613 - protein, 118 aa, synthetic construct
  REGION 1..118: note = Synthetic
EVQLVESGGGLVQPGGSLRLSCAASGFIFSSYEMNWVRQAPGKGLEWVSYISSSGNTIYYADSVKGRFTISRDNAKNSLYLXMNSLRAEDTAVYYCARFSYFYGMDVWGQGTTVTVSS

SEQ ID NO: 3614 - protein, 11 aa, synthetic construct
  REGION 1..11: note = Synthetic
ARFSYFYGMDV

SEQ ID NO: 3615 - protein, 108 aa, synthetic construct
  REGION 1..108: note = Synthetic
EIVLTQSPGTLSLSPGERATLSCRASQSISSSYLAWYQQRPGQAPRLLIYGASSRATGIPDRFSGSGSGTDFTLTISRLEPEDFAVYYCQQYRSSPLTFGGGTKVEIK

SEQ ID NO: 3616 - protein, 9 aa, synthetic construct
  REGION 1..9: note = Synthetic
QQYRSSPLT

SEQ ID NO: 3617 - protein, 122 aa, synthetic construct
  REGION 1..122: note = Synthetic
QVQLVQSGAEVKKPGASVKVSCKVSGYTLIELSMHWVRQAPGKGLEWMGGFDPEDGETIYAQKFQGRVTMTEDTSTDTAYMELSSLRSEDTAVYYCATSFPYRSQEQVLFYWGQGTLVTVSS

SEQ ID NO: 3618 - protein, 15 aa, synthetic construct
  REGION 1..15: note = Synthetic
ATSFPYRSQEQVLFY

SEQ ID NO: 3619 - protein, 107 aa, synthetic construct
  REGION 1..107: note = Synthetic
EIVMTQSPATLSVSPGERATLSCRASQSVSSNLAWYQQKPGQAPRLLIYGASTRATSIPARFSGSGSGTEFTLTISSLQSEDFAVYYCQPYNSWPKTFGQGTKVEIK

SEQ ID NO: 3620 - protein, 9 aa, synthetic construct
  REGION 1..9: note = Synthetic
QPYNSWPKT

SEQ ID NO: 3621 - protein, 123 aa, synthetic construct
  REGION 1..123: note = Synthetic
EVQLVESGGGLVQPGRSLRLSCAASGFTFDDYAMHWVRQAPGKGLEWVSGISWNIGSRGYADSVKGRFTISRDNAKNSLYLQMNSLRAEDTALYYCAKDIGNGDYDLSAFDSWGQGTMVTVSS

SEQ ID NO: 3622 - protein, 16 aa, synthetic construct
  REGION 1..16: note = Synthetic
AKDIGNGDYDLSAFDS

SEQ ID NO: 3623 - protein, 106 aa, synthetic construct
  REGION 1..106: note = Synthetic
DIQMTQSPSSLSASVGDRVTITCRASQSISSYLNWYQQKPGKAPKLLIYAASSLQSGVPSRFSGSGSGTDFTLTISSLQPEDFATYYCQQSYSSPTFGQGTKLEIK

SEQ ID NO: 3624 - protein, 8 aa, synthetic construct
  REGION 1..8: note = Synthetic
QQSYSSPT

SEQ ID NO: 3625 - protein, 131 aa, synthetic construct
  REGION 1..131: note = Synthetic
EVQLVESGGGLVKPGGSLRLSCAASGFTFSTYSMNWVRQAPGKGLEWVSSISSSSNYIYYADSVKGRFTISRDNAKNSLYLQMNSLRAEDTAVYYCAREAEREKAYYGFWSDYLPNCFDPWGQGTLVTVSS

SEQ ID NO: 3626 - protein, 24 aa, synthetic construct
  REGION 1..24: note = Synthetic
AREAEREKAYYGFWSDYLPNCFDP

SEQ ID NO: 3627 - protein, 108 aa, synthetic construct
  REGION 1..108: note = Synthetic
EIVMTQSPATLSVSPGERATLSCRASQTVSSNLAWYQQKPGQAPRLLIYGASTRATGIPARFSGSGSGTEFTLTISSLQSEDFAVYYCQQYYNWPPWTFGQGTKVEIK

SEQ ID NO: 3628 - protein, 10 aa, synthetic construct
  REGION 1..10: note = Synthetic
QQYYNWPPWT

SEQ ID NO: 3629 - protein, 123 aa, synthetic construct
  REGION 1..123: note = Synthetic
QVQLQESGPGLVKPSETLSLTCTVSGGSISTYYWSWIRQPPGKGLEWIGYIYYSGSTNYNPSLRSRVTISVDTSKNQFSLKLSSVTAADTAVYYCAREHFGSGSYYNGWFDPWGQGTLVTVSS

SEQ ID NO: 3630 - protein, 17 aa, synthetic construct
  REGION 1..17: note = Synthetic
AREHFGSGSYYNGWFDP

SEQ ID NO: 3631 - protein, 113 aa, synthetic construct
  REGION 1..113: note = Synthetic
DIVMTQSPDSLAVSLGERATLNCKSSQSVLYSSNNKNYLAWYQQKPGQPPKLLIYWASTRESGVPDRFSGSGSGTDFTLTISSLQAADVAVYYCQQYYNAPRTFGQGTKLEIK

SEQ ID NO: 3632 - protein, 9 aa, synthetic construct
  REGION 1..9: note = Synthetic
QQYYNAPRT

SEQ ID NO: 3633 - protein, 126 aa, synthetic construct; identical to SEQ ID NO: 9
  REGION 1..126: note = Synthetic

SEQ ID NO: 3634 - protein, 20 aa, synthetic construct
  REGION 1..20: note = Synthetic
AKCGFGTPPPTYYYYYGMDV

SEQ ID NO: 3635 - protein, 108 aa, synthetic construct; identical to SEQ ID NO: 10
  REGION 1..108: note = Synthetic

SEQ ID NO: 3636 - protein, 10 aa, synthetic construct
  REGION 1..10: note = Synthetic
QHLNSYPRLT

SEQ ID NO: 3637 - protein, 122 aa, synthetic construct
  REGION 1..122: note = Synthetic
EVQLVESGGGLVQPGGSLRLSCAASGFTFSSYDMHWVRQATGKGLEWVSGIGTADDTHYPGSVKGRFTISRENAKNSLYLQMNSLRAEDTAVYYCARGAKYSYGKENWFDPWGQGTLVTVSS

SEQ ID NO: 3638 - protein, 16 aa, synthetic construct
  REGION 1..16: note = Synthetic
ARGAKYSYGKENWFDP

SEQ ID NO: 3639 - protein, 109 aa, synthetic construct
  REGION 1..109: note = Synthetic
EIVLTQSPATLSLSPGERATLSCRASQSVSSYLAWYQQKPGQAPRLLIYGASNRATGIPARFSGSGSGTDFTLTISSLEPEDFAVYYCQQRSNWPPLWTFGQGTKVEIK

SEQ ID NO: 3640 - protein, 11 aa, synthetic construct
  REGION 1..11: note = Synthetic
QQRSNWPPLWT

SEQ ID NO: 3641 - protein, 127 aa, synthetic construct
  REGION 1..127: note = Synthetic
EVQLVESGGGLVKPGGSLRLSCAASGFTFSSNSMNWVRQAPGKGLEWVSSTSSSSSYIYYADSVKGRFTISRDNAKNSLYLQMNSLRAEDTAVYYCARAAPHYYDSSGYYPTPLDYWGQGTLVTVSS

SEQ ID NO: 3642 - protein, 20 aa, synthetic construct
  REGION 1..20: note = Synthetic
ARAAPHYYDSSGYYPTPLDY

SEQ ID NO: 3643 - protein, 108 aa, synthetic construct; identical to SEQ ID NO: 12
  REGION 1..108: note = Synthetic

SEQ ID NO: 3644 - protein, 10 aa, synthetic construct
  REGION 1..10: note = Synthetic
QQYYNWPPWT

SEQ ID NO: 3645 - protein, 126 aa, synthetic construct
  REGION 1..126: note = Synthetic
EVQLVESGGGLVKPGGSLRLSCAASGFTFSSYSMNWVRQAPGKGLEWVSSISSSSSYIYYADSVKGRFTISRDHAKNSLYLQMNSLRAEDTAVYYCARAQNYYGTSGYYPEGLDYWGQGTLVTVSS

SEQ ID NO: 3646 - protein, 19 aa, synthetic construct
  REGION 1..19: note = Synthetic
ARAQNYYGTSGYYPEGLDY

SEQ ID NO: 3647 - protein, 108 aa, synthetic construct; identical to SEQ ID NO: 18
  REGION 1..108: note = Synthetic

SEQ ID NO: 3648 - protein, 10 aa, synthetic construct [sequence omitted]

SEQ ID NO: 3649 - protein, 122 aa, synthetic construct
  REGION 1..122: note = Synthetic
QVQLVESGGGVVQPGRSLRLSCAASGFTFSSYGMHWVRQAPGKGLEWVAVISYDGSNKYYADSVKGRFTISRDNSKNTLYLQMNSLRAEDTAVYYCAKATDGSGWWGYFDYWGQGTLVTVSS

SEQ ID NO: 3650 - protein, 15 aa, synthetic construct
  REGION 1..15: note = Synthetic
AKATDGSGWWGYFDY

SEQ ID NO: 3651 - protein, 108 aa, synthetic construct
  REGION 1..108: note = Synthetic
EIVMTQSPATLSVSPGERATLSCRASQSVSSNLAWYQQKPGQAPRLLIYGASTRATGIPARFSGSGSGTEFTLTISSLQSEDFAVYYCQQYNNWPPYTFGQGTKLEIK

SEQ ID NO: 3652 - protein, 10 aa, synthetic construct
  REGION 1..10: note = Synthetic
QQYNNWPPYT

SEQ ID NO: 3653 - protein, 122 aa, synthetic construct
  REGION 1..122: note = Synthetic
QVQLVQSGAEVKKPGASVKVSCKVSGYTLPELSMHWVRQAPGKGLEWMGGFDPEDGETIYAQKFQGRVTMTEDTSTDTAYMELSSLRSEDTAVYYCATAPVVPGADNWFAPWGQGTRVTVSS

SEQ ID NO: 3654 - protein, 15 aa, synthetic construct
  REGION 1..15: note = Synthetic
ATAPVVPGADNWFAP

SEQ ID NO: 3655 - protein, 107 aa, synthetic construct
  REGION 1..107: note = Synthetic
EIVMTQSPATLSVSPGERATLSCRASQSVSSNLAWYQQKPGQAPRLLIYGASTRATGIPARFSGSGSGTEFTLTISSLQSEDFAVYYCQQYNNWPRTFGGGTKVEIK

SEQ ID NO: 3656 - protein, 9 aa, synthetic construct
  REGION 1..9: note = Synthetic
QQYNNWPRT

SEQ ID NO: 3657 - protein, 129 aa, synthetic construct
  REGION 1..129: note = Synthetic
EVQLVESGGGLVKPGGSLRLSCAASGFTFSTYGMNWVRQAPGKGLEWVSSISSSSSYIYYADSVKGRFTISRDNAKNSLSLQMNSLRAEDTAVYYCARDLELAARPSEWDYYYFGMDVWGQGTTVTVSS

SEQ ID NO: 3658 - protein, 22 aa, synthetic construct
  REGION 1..22: note = Synthetic
ARDLELAARPSEWDYYYFGMDV

SEQ ID NO: 3659 - protein, 108 aa, synthetic construct
  REGION 1..108: note = Synthetic
EIVMTQSPVXLSVSPGERATLSCRASQSVASNLAWYQQKPGQAPRLLIYGASTRATGIPARFSGSGSGTDFTLTISSLQSEDFAVYYCHQYYNWPPWTFGQGTKVEIK

SEQ ID NO: 3660 - protein, 10 aa, synthetic construct
  REGION 1..10: note = Synthetic
HQYYNWPPWT

SEQ ID NO: 3661 - protein, 124 aa, synthetic construct
  REGION 1..124: note = Synthetic
EVQLVESGGGLVQPGGSLRLSCAASGFTFSSYWMSWVRQAPGKGLEWVANINEDGSEKYYVDSLKGRFTISRDNAKNSLFLEMNSLRAEDTAVYYCAREGWFREFPYYYGMDVWGQGTTVTVSS

SEQ ID NO: 3662 - protein, 17 aa, synthetic construct
  REGION 1..17: note = Synthetic
AREGWFREFPYYYGMDV

SEQ ID NO: 3663 - protein, 112 aa, synthetic construct
  REGION 1..112: note = Synthetic
DIVMTQSPLSLPVTPGEPASISCRSSQSLLHSNGYNYLDWYLQKPGQSPQFLISLGSNRASGVPDRFSGSGSGTDFTLKISRVEAEDVGVYYCMQALQTSWTFGQGTKVEIK

SEQ ID NO: 3664 - protein, 9 aa, synthetic construct
  REGION 1..9: note = Synthetic
MQALQTSWT

SEQ ID NO: 3665 - protein, 128 aa, synthetic construct
  REGION 1..128: note = Synthetic
EVQLLESGGGLVQPGGSLRLSCAASGFTFRSYAMSWVRQAPGKGLEWVSGISASGAGTYYADSVKGRFTISRDNSKNTLHLQMNSLRAEDTAVYYCAKDSAGGWELLRFGTDDGFDIWGQGTMVTVSS

SEQ ID NO: 3666 - protein, 21 aa, synthetic construct
  REGION 1..21: note = Synthetic
AKDSAGGWELLRFGTDDGFDI

SEQ ID NO: 3667 - protein, 112 aa, synthetic construct
  REGION 1..112: note = Synthetic
DVVMTQSPLSLPVTLGQPASISCRSSQSLVYSDGNTYLNWFQQRPGQSPRRLIYKVSNRDSGVPDRFSGSGSGTHFTLKISRVEAEDVGVYYCMQGTHWPYTFGQGTKLEIK

SEQ ID NO: 3668 - protein, 9 aa, synthetic construct
  REGION 1..9: note = Synthetic
MQGTHWPYT

SEQ ID NO: 3669 - protein, 127 aa, synthetic construct; identical to SEQ ID NO: 27
  REGION 1..127: note = Synthetic

SEQ ID NO: 3670 - protein, 19 aa, synthetic construct
  REGION 1..19: note = Synthetic
AREGHEEGYGGPLNDVFDI

SEQ ID NO: 3671 - protein, 112 aa, synthetic construct; identical to SEQ ID NO: 28
  REGION 1..112: note = Synthetic

SEQ ID NO: 3672 - protein, 8 aa, synthetic construct
  REGION 1..8: note = Synthetic
QQYYSLRT

SEQ ID NO: 3673 - protein, 122 aa, synthetic construct
  REGION 1..122: note = Synthetic
EVQLVESGGVVVQPGGSLRLSCAASGFTFDDYTMHWVRQAPGKGLEWVSLISWDGDSTYYADSVMGRFTISRDNSKNSLYLQMNSLRTEDTALYYCAKDLIQFRYYYGMDVWGQGTTVTVSS

SEQ ID NO: 3674 - protein, 15 aa, synthetic construct
  REGION 1..15: note = Synthetic
AKDLIQFRYYYGMDV

SEQ ID NO: 3675 - protein, 107 aa, synthetic construct
  REGION 1..107: note = Synthetic
EIVLTQSPATLSLSPGERATLSCRASQSVSSYLAWYQQKPGQAPRLLIYDASNRATGIPARFSGSGSGTDFTLTISSLEPEDFAVYYCQQRSNWPLTFGGGTKVEIK

SEQ ID NO: 3676 - protein, 9 aa, synthetic construct
  REGION 1..9: note = Synthetic
QQRSNWPLT

SEQ ID NO: 3677 - protein, 124 aa, synthetic construct
  REGION 1..124: note = Synthetic
QVQLVESGGGVVQPGKSLRLSCAASGFTFSSYGLHWVRQAPGKGLEWVAVIWYDGSNKYYADSVKGRFTISRDNSKNTLYLQMNSLRAEDTAVYYCARDLTPPMIAPWYYFDYWGQGTLVTVSS

SEQ ID NO: 3678 - protein, 17 aa, synthetic construct
  REGION 1..17: note = Synthetic
ARDLTPPMIAPWYYFDY

SEQ ID NO: 3679 - protein, 107 aa, synthetic construct
  REGION 1..107: note = Synthetic
EIVMTQSPATLSVSPGERATLSCRASQSVSSNLAWYQQKPGQAPRLLIYGASTRATGIPARFSGSGSGTEFTLTISSLQSEDFAVYYCQQYNYWPPTFGGGTKVEIK

SEQ ID NO: 3680 - protein, 9 aa, synthetic construct
  REGION 1..9: note = Synthetic
QQYNYWPPT

SEQ ID NO: 3681 - protein, 127 aa, synthetic construct; identical to SEQ ID NO: 31
  REGION 1..127: note = Synthetic

SEQ ID NO: 3682 - protein, 20 aa, synthetic construct
  REGION 1..20: note = Synthetic
ARPQYHYYDTSTYHSYGFDI

SEQ ID NO: 3683 - protein, 111 aa, synthetic construct
  REGION 1..111: note = Synthetic
QFVLTQSPSASASLGASVNLTCTLSSGHNSYAIAWHQQQPEKGPRYLMSLNSDGSHTKGDGIPDRFSGSSSGAERFLTISSLQSEDEADYYCQTWDTGIRVFGGGTRLTVL

SEQ ID NO: 3684 - protein, 9 aa, synthetic construct
  REGION 1..9: note = Synthetic
QTWDTGIRV

SEQ ID NO: 3685 - protein, 120 aa, synthetic construct
  REGION 1..120: note = Synthetic
QVQLQESGPGLVKPSGTLSLTCAVSGDSISSTNWWSWVRQPPGKGLEWIGEIYHSGNTNYNPSLKSRVTMSVDKSKNQFSLKLSSVTAADTAVYYCARGWGAAAGNFDYWGQGTLVTVSS

SEQ ID NO: 3686 - protein, 13 aa, synthetic construct
  REGION 1..13: note = Synthetic
ARGWGAAAGNFDY

SEQ ID NO: 3687 - protein, 110 aa, synthetic construct
  REGION 1..110: note = Synthetic
QFVLTQPASVSGSPGQSITISCTGTSSDVGSYNLVSWYQQHPGKAPKLMIYQGNKRPSGVSNRLSGSKSGNTASLTISGLQAEDEADYYCCSYAGFSTWVFGGGTKLTVL

SEQ ID NO: 3688 - protein, 10 aa, synthetic construct
  REGION 1..10: note = Synthetic
CSYAGFSTWV

SEQ ID NO: 3689 - protein, 117 aa, synthetic construct; identical to SEQ ID NO: 37
  REGION 1..117: note = Synthetic

SEQ ID NO: 3690 - protein, 10 aa, synthetic construct
  REGION 1..10: note = Synthetic
ARGWIVSAAH

SEQ ID NO: 3691 - protein, 110 aa, synthetic construct
  REGION 1..110: note = Synthetic
QFVLTQPASVSGSPGQSITISCTGTNSDVGSYNLVSWFQQHPGKAPNLMIFEGTKRPSGVSNRFSGSKSGNTASLTISGLQAEDEADYFCCSYAGFSTWVFGGGTKLSXL

SEQ ID NO: 3692 - protein, 10 aa, synthetic construct
  REGION 1..10: note = Synthetic
CSYAGFSTWV

SEQ ID NO: 3693 - protein, 121 aa, synthetic construct; identical to SEQ ID NO: 35
  REGION 1..121: note = Synthetic

SEQ ID NO: 3694 - protein, 13 aa, synthetic construct
  REGION 1..13: note = Synthetic
ARVTMTWSWYFDL

SEQ ID NO: 3695 - protein, 108 aa, synthetic construct
  REGION 1..108: note = Synthetic
QFVLTQPRSVSGSPGQSVTMSCTGAISDVANYNYFSWYQQHPGRAPKLILFDVNKRPSGVPDRFSGSRSGNTASLTISGLQAEDEAEYYCCSYTDTWVFGGGTKLAVL

SEQ ID NO: 3696 - protein, 8 aa, synthetic construct
  REGION 1..8: note = Synthetic
CSYTDTWV

SEQ ID NO: 3697 - protein, 120 aa, synthetic construct; identical to SEQ ID NO: 45
  REGION 1..120: note = Synthetic

SEQ ID NO: 3698 - protein, 13 aa, synthetic construct
  REGION 1..13: note = Synthetic
AASSPLSGDWLDP

SEQ ID NO: 3699 - protein, 110 aa, synthetic construct
  REGION 1..110: note = Synthetic
QFVLTQPPSVSAAPGQKVTISCSGGSSNVGNNSVSWYQQLPGTTPKLLIYETDKRPSGIPDRFSGSKSGTSATLDITGLQTGDEADYYCGTWDSSLSAGVFGGGTKLTVL

SEQ ID NO: 3700 - protein, 11 aa, synthetic construct
  REGION 1..11: note = Synthetic
GTWDSSLSAGV

SEQ ID NO: 3701 - protein, 121 aa, synthetic construct
  REGION 1..121: note = Synthetic
QVQLQESGPGLVKPSQTLSLTCNVSGGSISSGGYYWTWIRQPPGEGLEWIGYIFYTGSTYYNPSLESRVAISVDTSKNQFSLKLNSVTAADTAVYFCARVRMTWSWYFDLWGRGTLVTVSS

SEQ ID NO: 3702 - protein, 13 aa, synthetic construct
  REGION 1..13: note = Synthetic
ARVRMTWSWYFDL

SEQ ID NO: 3703 - protein, 108 aa, synthetic construct
  REGION 1..108: note = Synthetic
QFVLTQPRSVSGSPGQSVTISCTGTSSDVGGYNYISWYQQHPGKAPKLMIYDVNKRPSGVPDRFSGSKSGNTASLTISGLQAEDEADYSCCSYADSWVFGGGTKLTVL

SEQ ID NO: 3704 - protein, 8 aa, synthetic construct
  REGION 1..8: note = Synthetic
CSYADSWV

SEQ ID NO: 3705 - protein, 114 aa, synthetic construct
  REGION 1..114: note = Synthetic
QVQLVQSGAEVKKPGASVKVSCKVSGYTFIKLSTHWVRQAPGKGLEWMGGFDPEDGETIYAQKFQGRVTMTEDTSTDTAYMELSSLRSEDTAVYYCATGTMDVWGQGTTVTVSS

SEQ ID NO: 3706 - protein, 7 aa, synthetic construct
  REGION 1..7: note = Synthetic
ATGTMDV

SEQ ID NO: 3707 - protein, 108 aa, synthetic construct
  REGION 1..108: note = Synthetic
SYVLTQPPSVSVSPGQTARITCSGDALPKQYAYWYQQKPGQAPVLVIYKDSERPSGIPERLSGSSSGTTVTLTISGVQAEDEADYYCQSADSSGTYRVFGGGTKLTVL

SEQ ID NO: 3708 - protein, 11 aa, synthetic construct
  REGION 1..11: note = Synthetic
QSADSSGTYRV

SEQ ID NO: 3709 - protein, 134 aa, synthetic construct
  REGION 1..134: note = Synthetic
EVQLVESGGGLVTPGGSLRLSCAASGFTFTNAWMSWVRQAPGKGLEWVGRIKSKTDGGTTDYAAPVKGRFTISRDDSKNTLFLQMTSLKTEDTAVYYCTTDIKVPRRYYYDSRGYYPSVYFDYWGQGTLVTVSS

SEQ ID NO: 3710 - protein, 25 aa, synthetic construct
  REGION 1..25: note = Synthetic
TTDIKVPRRYYYDSRGYYPSVYFDY

SEQ ID NO: 3711 - protein, 109 aa, synthetic construct
  REGION 1..109: note = Synthetic
QFVLTQPASVSGSPGQSITISCTGTSSDVGGYNDVSWYQQHPGKAPKLMIYEVRNRPSGVSNRFSGSKSGNTASLTITGLQVEDEADYYCSSYTSSLVLFGGGTKLTVL

SEQ ID NO: 3712 - protein, 9 aa, synthetic construct
  REGION 1..9: note = Synthetic
SSYTSSLVL

SEQ ID NO: 3713 - protein, 115 aa, synthetic construct
  REGION 1..115: note = Synthetic
QVQLQESGPGLVKPSGTLSLTCAVSGGSISSSNWWSWVRQPPGKGLEWIGEIYHSGNTNYNPSLKSRVTMTVDKSKNQFSLKLTSVSAADTAVYYCARGWNYDYWGQGTLVTVSS

SEQ ID NO: 3714 - protein, 8 aa, synthetic construct
  REGION 1..8: note = Synthetic
ARGWNYDY

SEQ ID NO: 3715 - protein, 110 aa, synthetic construct
  REGION 1..110: note = Synthetic
QFVLTQPASVSGSPGQSITISCTGTSSDVGSYNLVSWYQQHPGKAPKLMIYEGNKRPSGVSNRFSGSKSGNTASLTISGLQAEDEADYYCYSYAGSSTWVFGGGTKVTVL

SEQ ID NO: 3716 - protein, 10 aa, synthetic construct
  REGION 1..10: note = Synthetic
YSYAGSSTWV

SEQ ID NO: 3717 - protein, 120 aa, synthetic construct
  REGION 1..120: note = Synthetic
QVQLVQSGAEVKKPGAPVKVSCKVSGYTLVEIGVHWVRQAPGKGLEWMGGFDPEDAETVYAQRFQGRVIITEDTSTDTAYMELRGLTPEDTAVYYCAASSPLSGDWFDPWGHGTLVTVSS

SEQ ID NO: 3718 - protein, 13 aa, synthetic construct
  REGION 1..13: note = Synthetic
AASSPLSGDWFDP

SEQ ID NO: 3719 - protein, 110 aa, synthetic construct
  REGION 1..110: note = Synthetic
QFVLTQPPSVSAAPGQTVTISCSGGSSNIGKNSVSWYQHLPGTAPKLVIYENNKRPSGIPDRFSGSKSGTSATLGITGLQTGDEADFYCGTWDSKLSAGVFGGGTKLTVL

SEQ ID NO: 3720 - protein, 11 aa, synthetic construct
  REGION 1..11: note = Synthetic
GTWDSKLSAGV

SEQ ID NO: 3721 - protein, 122 aa, synthetic construct
  REGION 1..122: note = Synthetic
QVQLQESGPGLVKPSQTLSLTCSVSGGAISSGGYYWSWIRQHPGQGLEWIGYIYYSGTTYYNPSLQSRVTISVDTSKNQFSLKLSSVTAADTAVYYCARVRWGATGWFFDYWGQGSLVTVSS

SEQ ID NO: 3722 - protein, 14 aa, synthetic construct
  REGION 1..14: note = Synthetic
ARVRWGATGWFFDY

SEQ ID NO: 3723 - protein, 108 aa, synthetic construct
  REGION 1..108: note = Synthetic
QFVLTQPRSVSGSPGQSVTISCTGTSSDVVNYNYVSWYQHHPGKAPKLMIFDVNKRPSGVPDRFSGSRSGNTASLTISGLQADDEADYFCCSYTDSWVFGGGTKLTVL

SEQ ID NO: 3724 - protein, 8 aa, synthetic construct
  REGION 1..8: note = Synthetic
CSYTDSWV

SEQ ID NO: 3725 - protein, 130 aa, synthetic construct
  REGION 1..130: note = Synthetic
QVQLVQSGAEVKKPGSSVKVSCKTSGVIFSRNAFSWVRQAPGQGLEWMGRIIPFLDVTNSAQEFQGRVTLNADKSTSTVYMELSSLRSEDTAIYYCARHNGDPYDFWSGYNTWAGGLDVWGQGTAVTVSS

SEQ ID NO: 3726 - protein, 23 aa, synthetic construct
  REGION 1..23: note = Synthetic
ARHNGDPYDFWSGYNTWAGGLDV

SEQ ID NO: 3727 - protein, 110 aa, synthetic construct
  REGION 1..110: note = Synthetic
QFVLTQPPSASGTPGQRVTISCSGSGSNIGSNAVNWYQQLPGTAPKLLIYNQNQRPSGVPDRFSGSKSGTSASLAIGGLQSEDEADYYCATWDDNLSGLVFGGGTKLTVL

SEQ ID NO: 3728 - protein, 11 aa, synthetic construct
  REGION 1..11: note = Synthetic
ATWDDNLSGLV

SEQ ID NO: 3729 - protein, 123 aa, synthetic construct
  REGION 1..123: note = Synthetic
QVQLVQSGAEVKKPGASVKVSCKVSGYTLVELGIHWVRQAPGKGLEWMGGFDPENAQPTYAQKFQGRVTMPEDTSTDTAYMELSSLRSEDTAVYYCAAGPPIAPVPVNWLDPWGQGTPVTVSP

SEQ ID NO: 3730 - protein, 16 aa, synthetic construct
  REGION 1..16: note = Synthetic
AAGPPIAPVPVNWLDP

SEQ ID NO: 3731 - protein, 110 aa, synthetic construct
  REGION 1..110: note = Synthetic
QFVLTQPPSVSAAPGQKVTISCSGSSSNIGNNYVSWYQQVPGTAPKLLIYENIKRPSGIPDRFSGSKSGTSATLGITGLQTGDEADYYCGTWDGSLSAGVFGGGTKLTVL

SEQ ID NO: 3732 - protein, 11 aa, synthetic construct
  REGION 1..11: note = Synthetic
GTWDGSLSAGV

SEQ ID NO: 3733 - protein, 120 aa, synthetic construct
  REGION 1..120: note = Synthetic
QVQLVQSGAEVKKPGASVKVSCKASGYTFTSYGISWVRQAPGQGLEWMGWISGYNGDTNYPQKFQGRVTMTTDTSTSTAYMELRSLRSDDTAVYYCARDGSWRLADYAVDVWGQGTTVTV

SEQ ID NO: 3734 - protein, 15 aa, synthetic construct
  REGION 1..15: note = Synthetic
ARDGSWRLADYAVDV

SEQ ID NO: 3735 - protein, 111 aa, synthetic construct
  REGION 1..111: note = Synthetic
QFVLTQPPAASGTPGQRVTISCSGNSSNIGVNFVCWYQQLPGAAPKLLIYRNNQRPSGVPDRFSGSKSGTSASLAISGLRSEDEADYYCASWDDSLSGLWVFGGGTKLTVL

SEQ ID NO: 3736 - protein, 12 aa, synthetic construct
  REGION 1..12: note = Synthetic
ASWDDSLSGLWV

SEQ ID NO: 3737 - protein, 115 aa, synthetic construct
  REGION 1..115: note = Synthetic
QVQLQESGPGLVKPSGTLSLTCAVSGGSISSNNWWTWVRQSPGKGLEWIGEVYHTGNTNYNPSLKSRVTLSVDKSKNQFSLKVDSVTAADTAVYYCARGWSLDPWGQGILVSVSS

SEQ ID NO: 3738 - protein, 8 aa, synthetic construct
  REGION 1..8: note = Synthetic
ARGWSLDP

SEQ ID NO: 3739 - protein, 109 aa, synthetic construct
  REGION 1..109: note = Synthetic
QFVLTQPASVSGSPGQSITISCTGTSSDVGSYNLVSWYQQHPGKAPRLMIYEATKRPSGVSYRFSGSKSGNTASLAISGLQAEDEADYYCYSYAGFSTWVFGGGTKLTV

SEQ ID NO: 3740 - protein, 10 aa, synthetic construct
  REGION 1..10: note = Synthetic
YSYAGFSTWV

SEQ ID NO: 3741 - protein, 121 aa, synthetic construct
  REGION 1..121: note = Synthetic
QVQLVQSGAEVKKPGASVKVSCKVSGYTLPELSIHWVRLAPGKGLEWMGGFDPEHAETVYAQKFQGRIIMTEDTSTDTAYMDLSSLRSEDTAVYYCVTRYAVAGRGNFDYWGQGTLVTVSS

SEQ ID NO: 3742 - protein, 14 aa, synthetic construct
  REGION 1..14: note = Synthetic
VTRYAVAGRGNFDY

SEQ ID NO: 3743 - protein, 106 aa, synthetic construct
  REGION 1..106: note = Synthetic
SYVLTQPLSVSVALGQTARITCGGNNVGSKNVHWYQQRPGQAPILVIYRDNNRPSGIPQRFSGSNSGNTATLTISRAQTGDEADYYCQVWDSSPVVFGGGTKLTVL

SEQ ID NO: 3744 - protein, 9 aa, synthetic construct
  REGION 1..9: note = Synthetic
QVWDSSPVV

SEQ ID NO: 3745 - protein, 121 aa, synthetic construct
  REGION 1..121: note = Synthetic
QVQLVQSGAEVKNPGASVKVSCKASGYPFTGYYIHWVRQAPGQGLEWMGWINPNSGGTNYAQNFQDWVTMTRDTSISTAYMELSSLRSDDTAVYYCARGVLRFEYNWFDPWGQGTLVTVSS

SEQ ID NO: 3746 - protein, 14 aa, synthetic construct
  REGION 1..14: note = Synthetic
ARGVLRFEYNWFDP

SEQ ID NO: 3747 - protein, 107 aa, synthetic construct
  REGION 1..107: note = Synthetic
SYVLTQPPSVSVAPGQTARITCGGKNIGSKSVHWYQQKPGQAPVLLVNDDSDRPSGIPERFSGSTSGNTATLTISRVEAGDEADYYCQVWDSNNVHSFGGGTKLTVL

SEQ ID NO: 3748 - protein, 10 aa, synthetic construct
  REGION 1..10: note = Synthetic
QVWDSNNVHS

SEQ ID NO: 3749 - protein, 127 aa, synthetic construct
  REGION 1..127: note = Synthetic
EVQLVESGGGLVQPGGSLRLSCAASGFTFSIYEMNWVRQAPGKGLEWVSYITTSGTTRYNADSVKGRFTISRDNAKNLLYLQMNSLRAEDTAVYYCARPQYHYYESGAYHWYGFDIWGQGTMVTVSS

SEQ ID NO: 3750 - protein, 20 aa, synthetic construct
  REGION 1..20: note = Synthetic
ARPQYHYYESGAYHWYGFDI

SEQ ID NO: 3751 - protein, 111 aa, synthetic construct
  REGION 1..111: note = Synthetic
QFVLTQSPSASASLGASVKLTCSLSSGHSNYAIAWHQQQPERGPRFLMNLNSDGSHSKGDGIPDRFSGSSSGAERYLTISSLQSEDEADYYCQTWDTGIRVFGGGTKLTVL

SEQ ID NO: 3752 - protein, 9 aa, synthetic construct
  REGION 1..9: note = Synthetic
QTWDTGIRV

SEQ ID NO: 3753 - protein, 120 aa, synthetic construct
  REGION 1..120: note = Synthetic
QVQLQESGPGLVKPSGTLSLTCAVSGGSISSSNWWTWVRQPPGKGLEWIGEIYHSGNTNYNPSLKTRVTMSVDKSKNQLSLRLSSVTAADTAVYYCARRGDGYSHGHFDYWGQGTLVTVS

SEQ ID NO: 3754 - protein, 14 aa, synthetic construct
  REGION 1..14: note = Synthetic
ARRGDGYSHGHFDY

SEQ ID NO: 3755 - protein, 110 aa, synthetic construct
  REGION 1..110: note = Synthetic
QFVLTQPASVSGSPGQSITISCTGTSSDVGSYNLVSWYQQHPGKAPKLMIYEVFKRPSGVSNLFSGSKSGNTASLTISGLQAEDEADYYCCSYGGFSTWVFGGGTKLTVL

SEQ ID NO: 3756 - protein, 10 aa, synthetic construct
  REGION 1..10: note = Synthetic
CSYGGFSTWV

SEQ ID NO: 3757 - protein, 128 aa, synthetic construct
  REGION 1..128: note = Synthetic
EVQLLESGGGLVQPGGSLRLSCAASGFTFSSYAMTWVRQAPGKGLEWVSAFSGRGDNTYYADSVKGRFTVSRDNLKNTLYLQMNSLRAEDTAVYYCAKCLFGLVAGTEGDYYYGMDVWGQGTTVTVSS

SEQ ID NO: 3758 - protein, 21 aa, synthetic construct
  REGION 1..21: note = Synthetic
AKCLFGLVAGTEGDYYYGMDV

SEQ ID NO: 3759 - protein, 110 aa, synthetic construct
  REGION 1..110: note = Synthetic
QSVLTQPASVSGSPGQSITISCTGTSSDVGSYNLVSWYQQHPGKAPKLMIYEVFKRPSGVSNLFSGSKSGNTASLTISGLQAEDEADYYCCSYGGFSTWVFGGGTKLTVL

SEQ ID NO: 3760 - protein, 10 aa, synthetic construct
  REGION 1..10: note = Synthetic
CSYGGFSTWV

SEQ ID NO: 3761 - protein, 124 aa, synthetic construct
  REGION 1..124: note = Synthetic
QVQLVESGGGVVQPGRSLRLSCAASGFTFSNYGMHWVRQAPGKGLEWVAFIWYDGSNKYYADSVKGRFTISRDNSKNTLYLQMNSLRAEDAAVYYCARDRTDSSSFLAGYFDYWGQGTLVTVSS

SEQ ID NO: 3762 - protein, 17 aa, synthetic construct
  REGION 1..17: note = Synthetic
ARDRTDSSSFLAGYFDY

SEQ ID NO: 3763 - protein, 111 aa, synthetic construct
  REGION 1..111: note = Synthetic
QFVLTQSSSASASLGSSVKLTCTLSSGHSSYIIAWHQQQPGKAPRYLMKLEHSGSYNKGSGVPDRFSGSRSGADRYLTISNLQFEDEADYYCETWDSNTWVFGGGTKLTVL

SEQ ID NO: 3764 - protein, 9 aa, synthetic construct
  REGION 1..9: note = Synthetic
ETWDSNTWV

SEQ ID NO: 3765 - protein, 115 aa, synthetic construct
  REGION 1..115: note = Synthetic
QVQLQESGPGLVKPSGTLSLTCAVSGGSISSNNWWSWVRQTPGKGLEWIGEVFHSGNTNYNPSLKSRVTMSVDKSKNQFSLKLTSVTAADTAVYYCARAWYFDLWGRGTLVTVSP

SEQ ID NO: 3766 - protein, 8 aa, synthetic construct
  REGION 1..8: note = Synthetic
ARAWYFDL

SEQ ID NO: 3767 - protein, 110 aa, synthetic construct
  REGION 1..110: note = Synthetic
QFVLTQPASVSGSPGQSITISCTGTISDIGSYNLVSWYQLHPGKAPKLMIYEGSKRPSGVSNRFSGSKSGNTASLTISGLQAEDEADYYCYSYAGSSTWVFGGGTKLTVL

SEQ ID NO: 3768 - protein, 10 aa, synthetic construct
  REGION 1..10: note = Synthetic
YSYAGSSTWV

SEQ ID NO: 3769 - protein, 122 aa, synthetic construct
  REGION 1..122: note = Synthetic
QVQLVQSGAEVKKPGASVKVSCKASGYTFTSYGISWVRQAPGQGLEWMGWISAYNGNTDYAQRLQGRVTLTTDTSTSTASMELRSLTSDDTAVYFCARDGSWRLSDYAMDVWGQGTTVTVSS

SEQ ID NO: 3770 - protein, 15 aa, synthetic construct
  REGION 1..15: note = Synthetic
ARDGSWRLSDYAMDV

SEQ ID NO: 3771 - protein, 111 aa, synthetic construct
  REGION 1..111: note = Synthetic
QFVLTQPPSASGTPGQRVTISCSGSSSNIGTNNVCWYQQYPGTAPKLLIYRNNQRPSGVPDRFSGSKSGTSASLAISGLRSEDEADYYCATWDGSLSGLWVSGGGTKLTVL

SEQ ID NO: 3772 - protein, 12 aa, synthetic construct
  REGION 1..12: note = Synthetic
ATWDGSLSGLWV

SEQ ID NO: 3773 - protein, 123 aa, synthetic construct
  REGION 1..123: note = Synthetic
QLQLQESGPGLVKPSETLSLTCTVSGGSINNRSYYWGWVRQPPGKGLEWIGSIYYSGSSYYNPSLKSRVTISVDTSKNQFSLNLSSVTAADTAVYYCARADIVVVPAAIFDPWGQGTLVTVSS

SEQ ID NO: 3774 - protein, 15 aa, synthetic construct
  REGION 1..15: note = Synthetic
ARADIVVVPAAIFDP

SEQ ID NO: 3775 - protein, 107 aa, synthetic construct
  REGION 1..107: note = Synthetic
SYVLTQPPSVSVSPGQTASITCSGDNLGYKYVCWYQHKPGQSPVLVIYQSTKRPSGIPERFSGSNSGNTATLTISGTQAVDEADYYCQAWDTSTANVFGTGTKVTVL

SEQ ID NO: 3776 - protein, 10 aa, synthetic construct
  REGION 1..10: note = Synthetic
QAWDTSTANV

SEQ ID NO: 3777 - protein, 122 aa, synthetic construct
  REGION 1..122: note = Synthetic
QVQLQESGPGLVKPSQTLSLTCTVSSGSISSGAYYWSWIRQHPGQGLEWIGYIYNSGTTYYNPSLESRLAISVDTSKNQFSLRLSSVTAADTAVFYCARVVAAAGYWYFDLWGRGTLVTVSS

SEQ ID NO: 3778 - protein, 14 aa, synthetic construct
  REGION 1..14: note = Synthetic
ARVVAAAGYWYFDL

SEQ ID NO: 3779 - protein, 110 aa, synthetic construct
  REGION 1..110: note = Synthetic
QFVLTQPRSVSGSPGQSVTISCTGTSSDVGGYNYVSWYQQHPDKAPKVMIYDVRKRPSGVPDRFSGSKSGNTASLTISGLQAEDEADYYCCSYAGSYAWVFGGGTKLTVL

SEQ ID NO: 3780 - protein, 10 aa, synthetic construct
  REGION 1..10: note = Synthetic
CSYAGSYAWV

SEQ ID NO: 3781 - protein, 125 aa, synthetic construct; identical to SEQ ID NO: 47
  REGION 1..125: note = Synthetic

SEQ ID NO: 3782 - protein, 18 aa, synthetic construct
  REGION 1..18: note = Synthetic
ARRRADGSLTLPHDALDI

SEQ ID NO: 3783 - protein, 110 aa, synthetic construct
  REGION 1..110: note = Synthetic
QFVLTQPASVSGSPGQSITISCTGTSSDVGSYNLVSWYQQHPGKAPKVIIYEATKRPSGVCNRFSGSRSGNTASLTISGLQAEDEADYHCFSYAGFSSWVFGGGTTLTVL

SEQ ID NO: 3784 - protein, 10 aa, synthetic construct
  REGION 1..10: note = Synthetic
FSYAGFSSWV

SEQ ID NO: 3785 - protein, 117 aa, synthetic construct
  REGION 1..117: note = Synthetic
QVQLQESGPGLVKPSGTLSLTCAVSGDSISSTIWWSWVRQPPGKGLEWIGEIYHSGSTNYNPSLKSRVTISIDKSKNQFSLKLRSVTAADTAVYYCARGWIASAGYWGQGTLVTVSS

SEQ ID NO: 3786 - protein, 10 aa, synthetic construct
  REGION 1..10: note = Synthetic
ARGWIASAGY

SEQ ID NO: 3787 - protein, 110 aa, synthetic construct
  REGION 1..110: note = Synthetic
QFVLTQPASVSGSPGQSITISCTGASNDVGSYNLVSWFQQHPGKAPKLVIFEGTKRPSGVSNRFSGSKSGNTASLTISGLQAEDEADYHCCSYAGFSTWVFGGGTKLTVL

SEQ ID NO: 3788 - protein, 10 aa, synthetic construct
  REGION 1..10: note = Synthetic
CSYAGFSTWV

SEQ ID NO: 3789 - protein, 122 aa, synthetic construct
  REGION 1..122: note = Synthetic
QVQLVQSGAEVKKPGASVKVSCKVSGYTLIEVLLYWVRQAPGEGLEWMGGFDPESGETIYVQRFQGRVTMTEDTSTDTAYMELSSLRSDDTAVYYCTTRPAIFGAGGWFDPWGQGTLVTVSS

SEQ ID NO: 3790 - protein, 15 aa, synthetic construct
  REGION 1..15: note = Synthetic
TTRPAIFGAGGWFDP

SEQ ID NO: 3791 - protein, 110 aa, synthetic construct
  REGION 1..110: note = Synthetic
QFVLTQPRSVSGSPGQSVTISCTGTSSDVGGYNYVSWYQQHPGKAPKLMIYDVTKRPSGVPDRFSGSKSGNTASLTISGLQAEDEADYYCCSYAGSSTYVFGSGTKVTVL

SEQ ID NO: 3792 - protein, 10 aa, synthetic construct
  REGION 1..10: note = Synthetic
CSYAGSSTYV

SEQ ID NO: 3793 - protein, 127 aa, synthetic construct
  REGION 1..127: note = Synthetic
EVQLVESGGGLVKPGGSLRLSCAASGFTFSSYNMNWVRQAPGKGLEWVSLISSSGRFIYYADSVKGRFTISRDNAKNSLFLQMNSLRAEDTAVYYCARDLPAERFLEWLLSYGMDVWGQGTTVTVSS

SEQ ID NO: 3794 - protein, 20 aa, synthetic construct
  REGION 1..20: note = Synthetic
ARDLPAERFLEWLLSYGMDV

SEQ ID NO: 3795 - protein, 109 aa, synthetic construct
  REGION 1..109: note = Synthetic
QFVLTQPPSASGSPGQSVTISCTGTSSDIGGYNYVSWYQQHPGKAPKLMIYEVTKRPSGVPDRFSGSKSGNTASLTVSGLQAEDEADYYCSSYAGNSKIFGGGTKLTVL

SEQ ID NO: 3796 - protein, 9 aa, synthetic construct
  REGION 1..9: note = Synthetic
SSYAGNSKI

SEQ ID NO: 3797 - protein, 121 aa, synthetic construct
  REGION 1..121: note = Synthetic
QVQLVQSGAEVRKPGASVKVSCKVSGYTLPELSMHWVRQAPGKGLEWMGGFDPEDGETIYEQKFQGRVTMTEDTSTDTAYMELSSLRSEDTAVYYCATSAAIKKVDWLDPWGQGTLVTVSS

SEQ ID NO: 3798 - protein, 14 aa, synthetic construct
  REGION 1..14: note = Synthetic
ATSAAIKKVDWLDP

SEQ ID NO: 3799 - protein, 110 aa, synthetic construct
  REGION 1..110: note = Synthetic
QFVLTQPPSVSAAPGQKVTISCSGSSSNIGNNYVSWYQHLPGTAPKLLIYENDKRPSGIPDRFSGSKSGTSATLGITGLQTGDEADYYCGTWDNSLSAPYVFGTGTKVTV

SEQ ID NO: 3800 - protein, 12 aa, synthetic construct
  REGION 1..12: note = Synthetic
GTWDNSLSAPYV

SEQ ID NO: 3801 - protein, 125 aa, synthetic construct
  REGION 1..125: note = Synthetic
QVQLVQSGAEVKKPGASVKVSCKVSGYTLIELSMHWVRQAPGKGLEWMGGFDPENGETVYAQKFQGRVTMTEDTSTDTAYMELSSLRSEDTAVYYCATGPPYCPDAGCLNWFDPWGQGTLVTVSS

SEQ ID NO: 3802 - protein, 18 aa, synthetic construct
  REGION 1..18: note = Synthetic
ATGPPYCPDAGCLNWFDP

SEQ ID NO: 3803 - protein, 110 aa, synthetic construct
  REGION 1..110: note = Synthetic
QFVLTQPPSVSAAPGQKVTISCSGSSSNIGNNFVSWYQQLPGTAPKLLIYENNKRPSGIPDRFSGSKSGTSATLGITGLQTGDEADYYCGTWDTSLSAYVFGTGTKVTVL

SEQ ID NO: 3804 - protein, 11 aa, synthetic construct
  REGION 1..11: note = Synthetic
GTWDTSLSAYV

SEQ ID NO: 3805 - protein, 121 aa, synthetic construct
  REGION 1..121: note = Synthetic
QVQLQESGPGLVKPSETLSLTCTVSGGSISTSYWSWIRQPPGKGLEWIGYISYSGTTNYNPSLKSRVTIDTSKNQFSLNLSSVTAADTAVYYCARSDGEGPYPYYYGFDVWGQGTTIRVSS

SEQ ID NO: 3806 - protein, 17 aa, synthetic construct
  REGION 1..17: note = Synthetic
ARSDGEGPYPYYYGFDV

SEQ ID NO: 3807 - protein, 108 aa, synthetic construct
  REGION 1..108: note = Synthetic
SYVLTQPPSVSVSPGQTARITCSGDVLSKEYAYWYQQKPGQAPVLVIYKDSERPVGIPERFSGSSSGTTVTLTISGVQAEDESDYYCQSADTTGKAVVFGGGTKLTVL

SEQ ID NO: 3808 - protein, 11 aa, synthetic construct
  REGION 1..11: note = Synthetic
QSADTTGKAVV

SEQ ID NO: 3809 - protein, 122 aa, synthetic construct; identical to SEQ ID NO: 41
  REGION 1..122: note = Synthetic

SEQ ID NO: 3810 - protein, 15 aa, synthetic construct
  REGION 1..15: note = Synthetic
ARDGSWRLSDYAMDV

SEQ ID NO: 3811 - protein, 111 aa, synthetic construct
  REGION 1..111: note = Synthetic
QFVLTQPPSASGIPGQRVTIPCSGSSSNIGTNHVCWYQQYPGTAPKLLIYRNNQRPSGVPDRFSGSKSGTSASLAISGLRSEDEADYFCATWDGSLSNLWVSGGGTKLTVL

SEQ ID NO: 3812 - protein, 12 aa, synthetic construct
  REGION 1..12: note = Synthetic
ATWDGSLSNLWV

SEQ ID NO: 3813 - protein, 122 aa, synthetic construct
  REGION 1..122: note = Synthetic
QVQLVQSGAEVKRPGASVKVSCKVSGYTLPEISIHWVRQAPGKGLEWMGGFDPEDGETIYAQKFQGRVTMTEDTSTDTAYMELSSLTSEDTAVYYCAAGGALPAAIGWIAPWGQGTLVIVSS

SEQ ID NO: 3814 - protein, 15 aa, synthetic construct
  REGION 1..15: note = Synthetic
AAGGALPAAIGWIAP

SEQ ID NO: 3815 - protein, 108 aa, synthetic construct
  REGION 1..108: note = Synthetic
QSVLTQPRSVSGSPGQSVTISCSRTSSDVGGYNYVSWYQQHPGKAPKLMIYGVNKRPSGVPDRFSGSKSGNTASLTISGLQAEDEADYYCCSYAGGYTFGTGTKVAVL

SEQ ID NO: 3816 - skipped

SEQ ID NO: 3817 - protein, 126 aa, synthetic construct
  REGION 1..126: note = Synthetic
QVQLVQSGAEVKKPGASVKVSCKVSEYTLPEVSMHWVRQAPGKGLEWMGGFDPEDGETIYAQKFQGRVTMTEDTPTDTAYMEMSSLRAEDTAVYYCAISTPHCSSTSCHVSWFDPWGQGTLVTVSS

SEQ ID NO: 3818 - protein, 19 aa, synthetic construct
  REGION 1..19: note = Synthetic
AISTPHCSSTSCHVSWFDP

SEQ ID NO: 3819 - protein, 111 aa, synthetic construct
  REGION 1..111: note = Synthetic
QFVLTQPPSVSAAPGQKVAISCSGSSSNIGNNSVSWYQQLRGTAPKLLIYENNKRPSGIPDRFSGSKSGTSATLGITGLQTGDEADYYCGTWDSSLSPGRVIFGGGTKLTV

SEQ ID NO: 3820 - protein, 13 aa, synthetic construct
  REGION 1..13: note = Synthetic
GTWDSSLSPGRVI

SEQ ID NO: 3821 - protein, 119 aa, synthetic construct
  REGION 1..119: note = Synthetic
QVQLQESGPGLVKPSGTLSLTCAVSGGSISSSDWWSWVRQPPGKGLEWIGEIYHSANTNYNPSLKSRVTISIDKSKNQFSLKLTSVTAADTAVYYCARRSVVHNWFDPWGQGTLVTVSS

SEQ ID NO: 3822 - protein, 12 aa, synthetic construct
  REGION 1..12: note = Synthetic
ARRSVVHNWFDP

SEQ ID NO: 3823 - protein, 110 aa, synthetic construct
  REGION 1..110: note = Synthetic
QFVLTQPASVSGSPRQSITISCTGTSSDVGSYNLVSWYQQHPGKAPKLMIYEGSKRPSGVSNRFSGSKSGNTASLTISGLQAEDEADYYCSSYAGFSSWVFGGGTKVTVL

SEQ ID NO: 3824 - protein, 10 aa, synthetic construct
  REGION 1..10: note = Synthetic
SSYAGFSSWV

SEQ ID NO: 3825 - protein, 122 aa, synthetic construct; identical to SEQ ID NO: 51
  REGION 1..122: note = Synthetic

SEQ ID NO: 3826 - protein, 15 aa, synthetic construct
  REGION 1..15: note = Synthetic
TTGPAYGSGWFPPWY

SEQ ID NO: 3827 - protein, 111 aa, synthetic construct
  REGION 1..111: note = Synthetic
QFVLTQPPSVSAAPGQKVTISCSGTSSNIGNNYVSWYQQFPGTAPKLLIYENDKRPSGIPDRFSASKSGTSATLGISGLQSGDEADYYCGTWDRSLGAGGVFGGGTKLTVL

SEQ ID NO: 3828 - protein, 12 aa, synthetic construct
  REGION 1..12: note = Synthetic
GTWDRSLGAGGV

SEQ ID NO: 3829 - protein, 123 aa, synthetic construct
  REGION 1..123: note = Synthetic
QVQLVESGGGVVQPGRSLRLSCTASGFTFSNYGMHWVRQAPGKGLEWVAQTWYDESNKYYADSVKGRFTISRDNSKNTLYLQMNSLRAEDTAVYYCVREKRSVEWNDRGLDSWGQGTLVTVSS

SEQ ID NO: 3830 - protein, 16 aa, synthetic construct
  REGION 1..16: note = Synthetic
VREKRSVEWNDRGLDS

SEQ ID NO: 3831 - protein, 107 aa, synthetic construct
  REGION 1..107: note = Synthetic
SYVLTQPPSVSVSPGQTARITCSGDALGKQFAYWYQQKPGQAPVVVIYKDSERPSGIPERFSGSSSGTTVTLTISGVQAEDEADYYCQSADSSDAWVFGGGTKLTVL

SEQ ID NO: 3832 - protein, 10 aa, synthetic construct
  REGION 1..10: note = Synthetic
QSADSSDAWV

SEQ ID NO: 3833 - protein, 121 aa, synthetic construct
  REGION 1..121: note = Synthetic
QVQLVQSGAEVKKPGASVKVSCKVSGFTLTELSIHWVRQAPGRGLEWMGGFDPEDGETIYAQKFKGRVTMTEDTSTDTAYMELRSLRSEDTAVYYCTTTSPFRQGTWFDPWGLGTLVTVSS

SEQ ID NO: 3834 - protein, 14 aa, synthetic construct
  REGION 1..14: note = Synthetic
TTTSPFRQGTWFDP

SEQ ID NO: 3835 - protein, 110 aa, synthetic construct
  REGION 1..110: note = Synthetic
QFVLTQPASVSGSPGQSITISCTGTSSDVGGYNYVSWYQQHPGKAPKLMIYEVSNRPSGVSNRFSGSKSGNTASLTISGLQAEDEADYYCSSYTSSSTWVFGGGTKLTVL

SEQ ID NO: 3836 - protein, 10 aa, synthetic construct
  REGION 1..10: note = Synthetic
SSYTSSSTWV

SEQ ID NO: 3837 - protein, 122 aa, synthetic construct
  REGION 1..122: note = Synthetic
QVQLQESGPGLVKPSQTLSLICSVSGGSINSGAYYWSWVRQHPGKGLEWIGYIYSSGTTYYNPSLKSRAAISVDTSNNQFSLNLSSVTAADTAVYYCARVPAVAGSGWMFDYWGQGTLVTVS

SEQ ID NO: 3838 - protein, 15 aa, synthetic construct
  REGION 1..15: note = Synthetic
ARVPAVAGSGWMFDY

SEQ ID NO: 3839 - protein, 110 aa, synthetic construct
  REGION 1..110: note = Synthetic
QSALTQPRSVSGSPGQSVTISCTGTSSDIGGYNYFSWYRQHPGKAPKLMIYDVSKRPSGVPDRFSGSKSGNTASLTISGLQAEDEADYYCCSYAGTYTWVFGGGTKLTVL

SEQ ID NO: 3840 - protein, 10 aa, synthetic construct
  REGION 1..10: note = Synthetic
CSYAGTYTWV

SEQ ID NO: 3841 - protein, 124 aa, synthetic construct; identical to SEQ ID NO: 49
  REGION 1..124: note = Synthetic

SEQ ID NO: 3842 - protein, 17 aa, synthetic construct
  REGION 1..17: note = Synthetic
AATSALRPLIETSWFDP

SEQ ID NO: 3843 - protein, 111 aa, synthetic construct
  REGION 1..111: note = Synthetic
QFVLTQPPSVSAAPGQKVTISCSGSTSNIGSNFVAWYQHLPGAAPKLLIYENNKRPSGIPDRFSGSKSGTSATLGITGLQTGDEGDYYCGTWDSGLSGGGVFGGGTKLTVL

SEQ ID NO: 3844 - protein, 12 aa, synthetic construct
  REGION 1..12: note = Synthetic
GTWDSGLSGGGV

SEQ ID NO: 3845 - protein, 122 aa, synthetic construct
  REGION 1..122: note = Synthetic
QVQLVQSGAEVKKPGASVKVSCKVSGYTLTELPIHWVRQAPGKGLEWMGGFDPEDGDTIFAQKFQGRVTVTEDTSTDTAYMELSSLRSDDTAVYYCAAAPISSVTAGWVDPWGQGTLVTVSS

SEQ ID NO: 3846 - protein, 15 aa, synthetic construct
  REGION 1..15: note = Synthetic
AAAPISSVTAGWVDP

SEQ ID NO: 3847 - protein, 110 aa, synthetic construct
  REGION 1..110: note = Synthetic
QFVLTQPPSVSAAPGQKVTISCSGSSSNIGNNYVSWYQQLPGTAPKLLIYENNKRPSGIPDRFSGSKSGTSATLGITGLQTGDEADYYCGTWDSSLSAGVFGGGTKLTVL

SEQ ID NO: 3848 - protein, 11 aa, synthetic construct
  REGION 1..11: note = Synthetic
GTWDSSLSAGV

SEQ ID NO: 3849 - protein, 118 aa, synthetic construct
  REGION 1..118: note = Synthetic
QVQLVQSGLEVKKPGASVKVSCKASGYSFTNYGINWVRQAPGQGLEWMGWSNPNSGNTHYAQKFQGRVTMTADTSTTTAYMDLRSLRPDDTAVYSCARVADYGEMDYWGQGTLVTVSS

SEQ ID NO: 3850 - protein, 11 aa, synthetic construct
  REGION 1..11: note = Synthetic
ARVADYGEMDY

SEQ ID NO: 3851 - protein, 109 aa, synthetic construct
  REGION 1..109: note = Synthetic
SYVLTQPPSVSVSPGQTARITCSGDALPKQYAYWYQQKPGQAPILVIYKDNERPSGIPERFSGSTSGTTVTLTISGVQAEDEADYYCQSADNSGTPNWVFGGGTKLTVL

SEQ ID NO: 3852 - protein, 12 aa, synthetic construct
  REGION 1..12: note = Synthetic
QSADNSGTPNWV

SEQ ID NO: 3853 - protein, 123 aa, synthetic construct
  REGION 1..123: note = Synthetic
QVQLQESGPGLVKPSGTLSLTCAVSGDSISSGNWWTWVRQPPGKGLEWIGEIYHSGNTNYNPSLRSRFTISVDKSKNQFSLKLSSVTAADSALYYCARRFCSSTTCPNWFDPWGQGTLVTVSS

SEQ ID NO: 3854 - protein, 16 aa, synthetic construct
  REGION 1..16: note = Synthetic
ARRFCSSTTCPNWFDP

SEQ ID NO: 3855 - protein, 110 aa, synthetic construct
  REGION 1..110: note = Synthetic
QFVLTQPASVSGSPGQSITISCTGTSSDVGSYNVVSWYQLHPGKAPKLMIYEGSKRPSGVSNRFSGSKSGNTASLTISGLQAEDEADYYCCSYAGSSTWVFGGGTKLTVL

SEQ ID NO: 3856 - protein, 10 aa, synthetic construct
  REGION 1..10: note = Synthetic
CSYAGSSTWV

SEQ ID NO: 3857 - protein, 126 aa, synthetic construct
  REGION 1..126: note = Synthetic
QVQLVQSGAEVKKPGASVRVSCRVSGFTLPELSIHWVRQPPGKGLEWMGGFDPQSGATIYAQNFQGRVTLTEDTSTDTAFMDLKSLRSEDTAVYYCAISTPHCSSPNCYVNWFDPWGQGTPVTVSS

SEQ ID NO: 3858 - protein, 19 aa, synthetic construct
  REGION 1..19: note = Synthetic
AISTPHCSSPNCYVNWFDP

SEQ ID NO: 3859 - protein, 112 aa, synthetic construct
  REGION 1..112: note = Synthetic
QFVLTQPPSVSAAPGQKVTISCSGSSSNIANNFVSWYQQLPGTAPKLLIYETNKRPSGIPDRFSGSKSGTSATLGITGLQTGDEADYYCATWDSSLSAGRVVFGGGTKLTVL

SEQ ID NO: 3860 - protein, 13 aa, synthetic construct
  REGION 1..13: note = Synthetic
ATWDSSLSAGRVV

SEQ ID NO: 3861 - protein, 124 aa, synthetic construct
  REGION 1..124: note = Synthetic
QVQLVESGGGVVQPGRSLRLSCAASGFTFSNFGMHWVRQAPGKGLEWVTFIWYDGSNTYYADSVKGRFTISRDNSRNTLFLQMNSLRAEDTAIYYCARDRTDSTSFLAGYFDYWGQGTLVTVSS

SEQ ID NO: 3862 - protein, 17 aa, synthetic construct
  REGION 1..17: note = Synthetic
ARDRTDSTSFLAGYFDY

SEQ ID NO: 3863 - protein, 108 aa, synthetic construct
  REGION 1..108: note = Synthetic
SYVLTQPPSVSVSPGQTARITCSGDALPKKYAYWYQQKSGQAPVLVIYEDSKRPSGIPERFSGSSSGTMATLTISGAQVEDEADYYCYSTHSSGNLWVFGEGTKLTVL

SEQ ID NO: 3864 - protein, 11 aa, synthetic construct
  REGION 1..11: note = Synthetic
YSTHSSGNLWV

SEQ ID NO: 3865 - protein, 121 aa, synthetic construct
  REGION 1..121: note = Synthetic
QVQLVQSGAEVRKPGASVKVSCKVSGYTLPELSIHWVRQAPGKGLEWMGGFDPEDAETVFAQKLQGRVTMTEDTSTDTAYMELNSLRSEDTAVYYCAAAPAVVTSYWLDPWGQGTRVTVSS

SEQ ID NO: 3866 - protein, 14 aa, synthetic construct
  REGION 1..14: note = Synthetic
AAAPAVVTSYWLDP

SEQ ID NO: 3867 - protein, 110 aa, synthetic construct
  REGION 1..110: note = Synthetic
QFVLTQPPSVSAAPGQTVTISCSGGNSNIGSNYVSWYQQLPGTAPKLLIYDNYKRPSGIPDRFSGSKSGTSATLGITGLQTGDEADYYCGTWDSSLSAWVFGGGTKLTVL

SEQ ID NO: 3868 - protein, 11 aa, synthetic construct
  REGION 1..11: note = Synthetic
GTWDSSLSAWV

SEQ ID NO: 3869 - protein, 128 aa, synthetic construct
  REGION 1..128: note = Synthetic
QVQLVQSGAEVKKPGASVKVSCKVSGYTLTELSMHWVRQAPGKGLEWMGGFDPEAAETVYAQKFQGRVTMTEDTLTDIAYMELSSLRSEDTAVYYCAAGPAITGTPTQYSYFYGLDVWGRGTPVTVSS

SEQ ID NO: 3870 - protein, 21 aa, synthetic construct
  REGION 1..21: note = Synthetic
AAGPAITGTPTQYSYFYGLDV

SEQ ID NO: 3871 - protein, 109 aa, synthetic construct
  REGION 1..109: note = Synthetic
QSVLTQEPSFSVSPGGTVTLTCGLSSGSVSARNYPSWYQQTPGQAPRTLIYNTDTRSSGVPTRFSGSVLGNKAALTITGAQTDDESDYYCMLYMGSGLRVFGGGTKLTV

SEQ ID NO: 3872 - protein, 10 aa, synthetic construct
  REGION 1..10: note = Synthetic
MLYMGSGLRV

SEQ ID NO: 3873 - protein, 121 aa, synthetic construct; identical to SEQ ID NO: 79
  REGION 1..121: note = Synthetic

SEQ ID NO: 3874 - protein, 14 aa, synthetic construct
  REGION 1..14: note = Synthetic
ALAPVLRLGGWFDP

SEQ ID NO: 3875 - protein, 110 aa, synthetic construct
  REGION 1..110: note = Synthetic
QFVLTQPASVSGSPGQSITISCTGTDSDVGRYNYVSWYQQHPGKAPKLMIYEVTNRPSGVSNRFSASKSGNTASLSISGLQAEDEGDYYCSSYTGSTSWVFGGGTRLTVL

SEQ ID NO: 3876 - protein, 10 aa, synthetic construct
  REGION 1..10: note = Synthetic
SSYTGSTSWV

SEQ ID NO: 3877 - protein, 127 aa, synthetic construct
  REGION 1..127: note = Synthetic
EVQLVESGGGLVQPGGSLRLACVASGFTFSIYEMNWVRQAPGKGLEWVSYITTSGHARYNADSVKGRFTISRDNSKNSFYLQMNSLRAEDTAVYYCARPQYHYYDTSTYHSYGFDIWGQGTMVTVSS

SEQ ID NO: 3878 - protein, 20 aa, synthetic construct
  REGION 1..20: note = Synthetic
ARPQYHYYDTSTYHSYGFDI

SEQ ID NO: 3879 - protein, 111 aa, synthetic construct
  REGION 1..111: note = Synthetic
QSVLTQSPSASASLGASVNLTCTLSSGHNSYAIAWHQQQAEKGPRYLMSLNSDGSHNKGDGIPDRFSGSSSGAERFLTISSLQSEDEADYYCQTWDTGIRVFGGGTRLTVL

SEQ ID NO: 3880 - protein, 9 aa, synthetic construct
  REGION 1..9: note = Synthetic
QTWDTGIRV

SEQ ID NO: 3881 - protein, 125 aa, synthetic construct; identical to SEQ ID NO: 119
  REGION 1..125: note = Synthetic

SEQ ID NO: 3882 - protein, 18 aa, synthetic construct
  REGION 1..18: note = Synthetic
ARDFGFVVVVPDYDGLDV

SEQ ID NO: 3883 - protein, 110 aa, synthetic construct
  REGION 1..110: note = Synthetic
QFVLTQPPSASATPGQRVPISCSGGTSNIGSHSVYWYQHLPGTAPKLLIYRNDQRPSGVPDRFSGSKSGTSASLAISGLRSEDEADYYCAAWDDSLSGWVFGGGTRLTVL

SEQ ID NO: 3884 - protein, 11 aa, synthetic construct
  REGION 1..11: note = Synthetic
AAWDDSLSGWV

SEQ ID NO: 3885 - protein, 125 aa, synthetic construct
  REGION 1..125: note = Synthetic
QVQLQESGPGLVKPSGTLSLTCVVSGGSISSSHWWNWVRQPPGQGLEWIGEIYHSGNTNYNPSLKSRVSISIDKSKKQFSLKLSSVTVADTAVYYCARAKSPEWLQPVYQGFDYWGQGSLVTVSS

SEQ ID NO: 3886 - protein, 18 aa, synthetic construct
  REGION 1..18: note = Synthetic
ARAKSPEWLQPVYQGFDY

SEQ ID NO: 3887 - protein, 111 aa, synthetic construct
  REGION 1..111: note = Synthetic
QFVLTQPPSVSGAPGQRVTISCAGSSSNIGAGYDVHWYQHLPGTAPKLVIFGNTNRPSGVPDRFSGSKSGTSASLAITGLQAEDESDYYCQSYDSGLGGWVFGGGTKLTVL

SEQ ID NO: 3888 - protein, 11 aa, synthetic construct
  REGION 1..11: note = Synthetic
QSYDSGLGGWV

SEQ ID NO: 3889 - protein, 121 aa, synthetic construct
  REGION 1..121: note = Synthetic
QVQLVESGGGVVQPGTSLRLSCTTSGFAFTSYAMHWVRQAPGKGLEWVALLPFNGNDKYYAESVKGRFTISRDTSKNTLYLQMNSLRAEDTAVYYCARESSAYYYGWFDPWGQGTLVTVSS

SEQ ID NO: 3890 - protein, 14 aa, synthetic construct
  REGION 1..14: note = Synthetic
ARESSAYYYGWFDP

SEQ ID NO: 3891 - protein, 110 aa, synthetic construct
  REGION 1..110: note = Synthetic
QFVLTQPPSASGTPGQRVSISCSGSGSNIGSNYVYWYQQHPGTAPKLLIYRSNQRPSGVPDRFSGSKSGTSASLAISGLRSEDEADYYCATWDDSLSGVLFGGGTKLTVL

SEQ ID NO: 3892 - protein, 11 aa, synthetic construct
  REGION 1..11: note = Synthetic
ATWDDSLSGVL

SEQ ID NO: 3893 - protein, 122 aa, synthetic construct
  REGION 1..122: note = Synthetic
QVQLQESGPGLVKPSGTLSLTCAVSGDSISSRSWWTWVRQPPGKGLEWIGEIYQSGNTNYNPSLKSRVSISVDKSKNQFSLKLNSVTAADTAVYFCARRGLEYSTSRALDYWGQGTLVTVSS

SEQ ID NO: 3894 - protein, 15 aa, synthetic construct
  REGION 1..15: note = Synthetic
ARRGLEYSTSRALDY

SEQ ID NO: 3895 - protein, 110 aa, synthetic construct
  REGION 1..110: note = Synthetic
QFVLTQPASVSGSPGQSITISCTGTSSDVGSYNLVSWYQQHPGKAPKLMIYEGTKRPSGVSNRFSGSKSGNTASLTISGLQAEDEADYYCSSYAGFSTWVFGEGTKLTVL

SEQ ID NO: 3896 - protein, 10 aa, synthetic construct
  REGION 1..10: note = Synthetic
SSYAGFSTWV

SEQ ID NO: 3897 - protein, 124 aa, synthetic construct
  REGION 1..124: note = Synthetic
QVQLVESGGGVVQPGRSLRLSCAASGFTFSTYGMHWVRQAPGKGLEWVAVIWSDGINTYYAASVKGRFTISRDNSKNTLNLQMNSLRAEDTAIYYCAREIPDTSTWFVNGMDVWGQGTTVTVSS

SEQ ID NO: 3898 - protein, 17 aa, synthetic construct
  REGION 1..17: note = Synthetic
AREIPDTSTWFVNGMDV

SEQ ID NO: 3899 - protein, 110 aa, synthetic construct
  REGION 1..110: note = Synthetic
QSVLTQPPSVSAAPGQKVTISCSGSSSNIGNNYVSWYQQLPGTAPKLLIYENHKRPSRIPDRFSGSKSGTSATLGITGLQTGDEADYYCGTWDSSLSAGVFGGGTKLTVL

SEQ ID NO: 3900 - protein, 11 aa, synthetic construct
  REGION 1..11: note = Synthetic
GTWDSSLSAGV

SEQ ID NO: 3901 - protein, 125 aa, synthetic construct
  REGION 1..125: note = Synthetic
QVQLVQSGAEVKKPGASVRVSCKVSGYTLVELAIHWVRQPPGKGLEWMGGFDPEDGKTIYAQKFQGRVTMTEDTSTDTAYMDLSSLRSEDTAIYYCATGPPYCTTSTCPERWLDPWGQGTLVTVS

SEQ ID NO: 3902 - protein, 19 aa, synthetic construct
  REGION 1..19: note = Synthetic
ATGPPYCTTSTCPERWLDP

SEQ ID NO: 3903 - protein, 109 aa, synthetic construct
  REGION 1..109: note = Synthetic
QFVLTQPPSVSGAPGQRVTISCSGSSSNIGSNTVNWYQQLPGTAPRLLIYNNSQRPSGVPDRFSGSKSGTAASLAISGLQSEDEADYYCAAWDDSLTVIFGGGTKLTVL

SEQ ID NO: 3904 - protein, 10 aa, synthetic construct
  REGION 1..10: note = Synthetic
AAWDDSLTVI

SEQ ID NO: 3905 - protein, 122 aa, synthetic construct
  REGION 1..122: note = Synthetic
QVQLQESGPGVVKPSGTLSLTCAVSGDSISSSKWWSWVRQSPEKGLEWIGEIFHSGNANYCPSLKSRVTMSVDKSKNQFSLKLSSVTAADTAVYYCASRHCSGGSCSFFDYWGQGTLVTVSS

SEQ ID NO: 3906 - protein, 15 aa, synthetic construct
  REGION 1..15: note = Synthetic
ASRHCSGGSCSFFDY

SEQ ID NO: 3907 - protein, 110 aa, synthetic construct
  REGION 1..110: note = Synthetic
QFVLTQPASVSASPGQSITISCTGTSSDVGSYNLVSWYQHHPGKAPKLMIYEGTKRPSGVSNRFSGSKSGNTASLTISGPQDEDEADYYCFSYAGSSTWVFGGGTTLTVL

SEQ ID NO: 3908 - protein, 10 aa, synthetic construct
  REGION 1..10: note = Synthetic
FSYAGSSTWV

SEQ ID NO: 3909 - protein, 126 aa, synthetic construct
  REGION 1..126: note = Synthetic
QVQLVQSGAEVKKPGASVKVSCKVSGYTLPELAMHWVRQAPGKGLEWMGGFDSKHGETIYAQKFQGRVTMTEDTSTDTAYMELSSLRSEDTAVYYCATVFAYCSSATCPPSWLDPWGQGTLVTVSS

SEQ ID NO: 3910 - protein, 19 aa, synthetic construct
  REGION 1..19: note = Synthetic
ATVFAYCSSATCPPSWLDP

SEQ ID NO: 3911 - protein, 110 aa, synthetic construct
  REGION 1..110: note = Synthetic
QSVLTQPPSVSAAPGQKVTISCSGSSSSIGNNYVSWYQQFPGTAPKLLIYENNKRLSGIPDRFSGSKSGTSATLGITGLQTGDEADYYCGTWDSSLSAYVFGIGTKVTVL

SEQ ID NO: 3912 - protein, 11 aa, synthetic construct
  REGION 1..11: note = Synthetic
GTWDSSLSAYV

SEQ ID NO: 3913 - protein, 123 aa, synthetic construct
  REGION 1..123: note = Synthetic
QVQLVESGGGVVQPGKSLRLSCAASGFSFSSFGMHWVRQAPGKGLEWVAVIWYDGSNKYYADSVKGRFTISRDNSNNTLYLQMNSLRVEDTAVYYCARDRIDDTSFLAGYFDYWGQGTLVTVS

SEQ ID NO: 3914 - protein, 17 aa, synthetic construct
  REGION 1..17: note = Synthetic
ARDRIDDTSFLAGYFDY

SEQ ID NO: 3915 - protein, 111 aa, synthetic construct
  REGION 1..111: note = Synthetic
QPVLTQSSSASASLGSSVKLTCTLSSGHSSYIXAWHHQPPGKAPRYLMTLEGSGSYNKGSGVPDCFSGSSSGADRYLTISNLQFEDEADYYCETWDSNTWMFGGGTKLTVL

SEQ ID NO: 3916 - protein, 9 aa, synthetic construct
  REGION 1..9: note = Synthetic
ETWDSNTWM

SEQ ID NO: 3917 - protein, 121 aa, synthetic construct
  REGION 1..121: note = Synthetic
QVQLQESGPGLVKPSQTLSLTCTVSGGSISSGDYYWSWVRQPPGKGLEWIGYIFYSGTTYYNPSLESRVTISVDTSKNQFSLKLNSVTAADTAVYYCARVRITWSWYFDLWGRGTLVTVSS

SEQ ID NO: 3918 - protein, 13 aa, synthetic construct
  REGION 1..13: note = Synthetic
ARVRITWSWYFDL

SEQ ID NO: 3919 - protein, 108 aa, synthetic construct
  REGION 1..108: note = Synthetic
QFVLTQPRSVSGSPGQSVTISCTGTSSDVGGYNYVSWYQQYPGKAPKLMIYDVNKRPSGVPDRFSGSKSGNTASLTISGLQAEDEADYYCCSYAGSWVFGGGTKLTVL

SEQ ID NO: 3920 - protein, 8 aa, synthetic construct
  REGION 1..8: note = Synthetic
CSYAGSWV

SEQ ID NO: 3921 - protein, 122 aa, synthetic construct
  REGION 1..122: note = Synthetic
QVQLVQSGAEVRKPGASVKVSCKVSGYTLIELSIHWVRQAPGEGLEWMGGFDPEDVKTIYAQKFQGRLTMTEDTSTDTAYMELSSLRSEDTAVYFCATTSALRPLTQANWLDPWGQGTLVIV

SEQ ID NO: 3922 - protein, 17 aa, synthetic construct
  REGION 1..17: note = Synthetic
ATTSALRPLTQANWLDP

SEQ ID NO: 3923 - protein, 111 aa, synthetic construct
  REGION 1..111: note = Synthetic
QFVLTQPPSVSAAPGQKVTISCSGSTSNIGNNYVCWYQQLPGRAPKLLIYENDKRPSGIPDRFSGSKSGTSATLGITGLQTGDEADYYCGTWDSSLSAGGVFGGGTKLTVL

SEQ ID NO: 3924 - protein, 12 aa, synthetic construct
  REGION 1..12: note = Synthetic
GTWDSSLSAGGV

SEQ ID NO: 3925 - protein, 123 aa, synthetic construct
  REGION 1..123: note = Synthetic
QLQLQESGSGLVKPSQTLSLTCAVSGGSISSGGSSWSWIRQPPGKGLEWIGFIYHSGSTYYNPSLKSRVTISVDRAKNQFSLKLTSVTAADTAVYYCAREAGSSGWSLWFDPWGQGTLVTVAS

SEQ ID NO: 3926 - protein, 15 aa, synthetic construct
  REGION 1..15: note = Synthetic
AREAGSSGWSLWFDP

SEQ ID NO: 3927 - protein, 113 aa, synthetic construct
  REGION 1..113: note = Synthetic
QFVLTQPPSVSGAPGQRVTISCTGSSSNIGAGSDVHWYQQLPGTAPKLLIYSNNNRPSGVPDRFSGSKSGTSASLAITGLQAEDEADYYCQSYDSSLSGPSYVFGTGTKVTVL

SEQ ID NO: 3928 - protein, 13 aa, synthetic construct
  REGION 1..13: note = Synthetic
QSYDSSLSGPSYV

SEQ ID NO: 3929 - protein, 116 aa, synthetic construct
  REGION 1..116: note = Synthetic
QVQLQESGPGLVKPSETLSLTCAVSGGSISSNNWWSWVRQPPGKGLEWIGEIYHSGNTNYNPSLKSRVTMSVDKSQNQFSLKLNSVTAADTAVYYCARGWIAAAGIWGQGTLVTVS

SEQ ID NO: 3930 - protein, 10 aa, synthetic construct
  REGION 1..10: note = Synthetic
ARGWIAAAGI

SEQ ID NO: 3931 - protein, 110 aa, synthetic construct
  REGION 1..110: note = Synthetic
QFVLTQPTSVSGSPGQSITMSCTGTSSNVGSYNLVSWFQQHPGKAPKLMIYEGNKRPSGVSNRFSGSKSGNTASLTISGLQAEDEADYYCCSYAGSSTWVFGGGTKLTVL

SEQ ID NO: 3932 - protein, 10 aa, synthetic construct
  REGION 1..10: note = Synthetic
CSYAGSSTWV

SEQ ID NO: 3933 - protein, 122 aa, synthetic construct
  REGION 1..122: note = Synthetic
QVQLQESGPGLVKPSQTLSLICNVSGGSISSGAYYWSWVRQYPGKGLEWIGYTSYSGSTYGNPSLESRVTMSVETSKNQFSLTLTSVTAADTAVYYCAIVPYITILWAFDIWGQGTMVTVSS

SEQ ID NO: 3934 - protein, 14 aa, synthetic construct
  REGION 1..14: note = Synthetic
AIVPYITILWAFDI

SEQ ID NO: 3935 - protein, 110 aa, synthetic construct
  REGION 1..110: note = Synthetic
QFVLTQPRSVSGSPGQSVTISCTGTSSDVGGYNYVSWYQQHPGKAPKLMIYDVRKRPSGVPDRFSGSKSGNTASLTISGLQAEDEADYCCCSYVVNYGYVFGSGTKVIVL

SEQ ID NO: 3936 - protein, 10 aa, synthetic construct
  REGION 1..10: note = Synthetic
CSYVVNYGYV

SEQ ID NO: 3937 - protein, 131 aa, synthetic construct
  REGION 1..131: note = Synthetic
QVQLVQSGAEVKKPGASVNVSCKVSGYTLIELSMHWVRQTPGKGLEWMGGFDPEDGETIYAQKFQGRVTMTEDTSTDSAYMELSSLRSEDTAVYYCATAVTGMITSGGVIVPYYYYALDVWGQGTTVTVSS

SEQ ID NO: 3938 - protein, 24 aa, synthetic construct
  REGION 1..24: note = Synthetic
ATAVTGMITSGGVIVPYYYYALDV

SEQ ID NO: 3939 - protein, 110 aa, synthetic construct
  REGION 1..110: note = Synthetic
QFVLTQPASVSGSPGQSITISCTGTSGDVGSYNLVSWYQQHPGEAPKLMIYEGSKRPSGVSNRFSGSKSGSTASLTISGLQAEDEANYYCCSYAGSITLVFGGGTKVTVL

SEQ ID NO: 3940 - protein, 10 aa, synthetic construct
  REGION 1..10: note = Synthetic
CSYAGSITLV

SEQ ID NO: 3941 - protein, 123 aa, synthetic construct
  REGION 1..123: note = Synthetic
QVQLVQSGAEVKKPGASVKVSCKVSGYTLTELSIHWVRQAPGKGLEWMGGFDPEDGETIYAQKFQGRVTMTEDTSTDTGYMELSGLRSEDTAVYYCATVPPLVYINSRSLDYWGQGTLVTVSS

SEQ ID NO: 3942 - protein, 16 aa, synthetic construct
  REGION 1..16: note = Synthetic
ATVPPLVYINSRSLDY

SEQ ID NO: 3943 - protein, 108 aa, synthetic construct
  REGION 1..108: note = Synthetic
QFVLTQPRSLSGSPGQSVTISCTGTSRDVGGYNYVSWFQQHPGKAPKLMIYAVTKRPSGVPDRFSGSKSGNTASLTISGLQAEDEADYYCCSYAGRPWVFGGGTKLTV

SEQ ID NO: 3944 - protein, 9 aa, synthetic construct
  REGION 1..9: note = Synthetic
CSYAGRPWV

SEQ ID NO: 3945 - protein, 126 aa, synthetic construct
  REGION 1..126: note = Synthetic
QVQLVQSGAEVKKPGASVKVSCMVSGFTLTELSIHWVRQSPGKGLEWMGGFDPEDAETIYAQNFQGRVTMTEDTSTDTAYMELSSLKSEDTAVYYCGISTPHCKVNRCYVYWIDPWGQGTPVTVSS

SEQ ID NO: 3946 - protein, 19 aa, synthetic construct
  REGION 1..19: note = Synthetic
GISTPHCKVNRCYVYWIDP

SEQ ID NO: 3947 - protein, 112 aa, synthetic construct
  REGION 1..112: note = Synthetic
QFVLTQPPSVSAAPGQKVTISCSGSTFNIGNNYVSWYQQLPGTAPKLLIYENNKRPSGIPDRFSGSKSGTSATLGITGLQTGDEADYYCGTWDTSLSAGRVVFGGGTKLTVL

SEQ ID NO: 3948 - protein, 13 aa, synthetic construct
  REGION 1..13: note = Synthetic
GTWDTSLSAGRVV

SEQ ID NO: 3949 - protein, 118 aa, synthetic construct; identical to SEQ ID NO: 53
  REGION 1..118: note = Synthetic

SEQ ID NO: 3950 - protein, 11 aa, synthetic construct
  REGION 1..11: note = Synthetic
ARVADYGELDS

SEQ ID NO: 3951 - protein, 108 aa, synthetic construct
  REGION 1..108: note = Synthetic
SYVLTQPPSVSVSPGQTARITCSGDALPKQYAYWYQQKPGQAPVLLIYKDTERPSGIPERFSGSGSGTTVTLTISGVQAEDEADYYCQSADNSDSPNWVFGGGTKLTV

SEQ ID NO: 3952 - protein, 12 aa, synthetic construct
  REGION 1..12: note = Synthetic
QSADNSDSPNWV

SEQ ID NO: 3953 - protein, 125 aa, synthetic construct
  REGION 1..125: note = Synthetic
QVQLQESGPGLVKPSGTLSLTCAVSGGSISSGYWWSCVRQPPGKGLEWIGEIYHSGNTNYSPSLKSRVTISVDKSKNQFSLKLSSVTAADTAVYYCARRRADGSVTLPHDAFDIWGQGTMVTVSS

SEQ ID NO: 3954 - protein, 18 aa, synthetic construct
  REGION 1..18: note = Synthetic
ARRRADGSVTLPHDAFDI

SEQ ID NO: 3955 - protein, 110 aa, synthetic construct
  REGION 1..110: note = Synthetic
QFVLTQPASVSGSPGQSITISCTGTSSDVGSYNLVSWYQQHPGKAPKLIIYEGSKRPLGVSNRFSGSKSGNTASLTISGLQAEDEADYYCCSYAGFSTWVFGGGTKLTVL

SEQ ID NO: 3956 - protein, 10 aa, synthetic construct
  REGION 1..10: note = Synthetic
CSYAGFSTWV

SEQ ID NO: 3957 - protein, 121 aa, synthetic construct; identical to SEQ ID NO: 77
  REGION 1..121: note = Synthetic

SEQ ID NO: 3958 - protein, 14 aa, synthetic construct
  REGION 1..14: note = Synthetic
TTTTPKGHPGWLDP

SEQ ID NO: 3959 - protein, 110 aa, synthetic construct
  REGION 1..110: note = Synthetic
QFVLTQPASVSGSPGQSITISCTGTSSDVGSYNLVSWYQQHPGKAPKLMIYEDNKRPSGVSSRFSGSKSGYTASLTISGLQAEDEADYYCCSYAGSGTSVFGTGTEVTVL

SEQ ID NO: 3960 - protein, 10 aa, synthetic construct
  REGION 1..10: note = Synthetic
CSYAGSGTSV

SEQ ID NO: 3961 - protein, 126 aa, synthetic construct; identical to SEQ ID NO: 75
  REGION 1..126: note = Synthetic

SEQ ID NO: 3962 - protein, 19 aa, synthetic construct
  REGION 1..19: note = Synthetic
AREPPITIFGVVFPCCMDV

SEQ ID NO: 3963 - protein, 114 aa, synthetic construct
  REGION 1..114: note = Synthetic
QSVLTQPSSLSASPGASASLTCTFRSGINVGTYRIYWYQQKPGSPPQFLLRYNSDSDYQRGSAVPSRFSGSKDASANAGILLISGLHSEDDADYYCMIWHGSAWVFGGGTKLTV

SEQ ID NO: 3964 - protein, 9 aa, synthetic construct
  REGION 1..9: note = Synthetic
MIWHGSAWV

SEQ ID NO: 3965 - protein, 130 aa, synthetic construct
  REGION 1..130: note = Synthetic
QVQLVESGGGVVQPGRSLRLSCAASGFTFSKYALHWVRQAPGKGLEWVADISFDGSNNHHADSVRGRFTTSRDNSKNSMYLQMNSLRAEDTAVYYCARDFVLCSSSTCRGGVFLGGMDVWGQGTTVTVSS

SEQ ID NO: 3966 - protein, 23 aa, synthetic construct
  REGION 1..23: note = Synthetic
ARDFVLCSSSTCRGGVFLGGMDV

SEQ ID NO: 3967 - protein, 107 aa, synthetic construct
  REGION 1..107: note = Synthetic
EIVLTQSPATLSLSPGARATLSCRASQSVGSYLAWYQQVPGQAPRLLIYDASNRAPGIPPRFSGSGSGKDFSLTISSLEPADFAAYYCQQRSNWPFTFGGGTKVEIK

SEQ ID NO: 3968 - protein, 9 aa, synthetic construct
  REGION 1..9: note = Synthetic
QQRSNWPFT

SEQ ID NO: 3969 - protein, 133 aa, synthetic construct
  REGION 1..133: note = Synthetic
QVQLQESGPGLVKPSGTLSLTCTVSGGSISSSNWWSWVRQPPGKGLEWLGEIYQSGSTNYSPSLKSRVTISIDKFKNQFSLKLRYVTAADTGVYYCARVPGGGLDTPPLSSWYSHYYYGLDVWGQGTTVTVSS

SEQ ID NO: 3970 - protein, 26 aa, synthetic construct
  REGION 1..26: note = Synthetic
ARVPGGGLDTPPLSSWYSHYYYGLDV

SEQ ID NO: 3971 - protein, 108 aa, synthetic construct
  REGION 1..108: note = Synthetic
EIVLTQSPGTLSLSLGERATLSCRASQSVRSTYLAWYQQKPGQAPRLLIYGASSRATGIPDRFSGSGSGTDFTLTISRLEPEDFAVYYCQQYGSSLWTFGQGTKVEIK

SEQ ID NO: 3972 - protein, 9 aa, synthetic construct
  REGION 1..9: note = Synthetic
QQYGSSLWT

SEQ ID NO: 3973 - protein, 124 aa, synthetic construct
  REGION 1..124: note = Synthetic
EVQLVESGGGLVQPGGSRRLSCEGSGFTFSNYWMSWVRQAPGKGLEWVANINQDGSEKYYVDSVMGRFTISRDNAKKSLYLQMNSLRGEDTAVYYCARHYSSYPYYYYYGMDVWGQGTTVTVSS

SEQ ID NO: 3974 - protein, 17 aa, synthetic construct
  REGION 1..17: note = Synthetic
ARHYSSYPYYYYYGMDV

SEQ ID NO: 3975 - protein, 107 aa, synthetic construct
  REGION 1..107: note = Synthetic
AIQMTQSPSSLSASVGDRVTITCRASQDIRNDLGWYQQKPGKAPKLLIYTTSSLQSGVPSRFSGSGSGTDFTLTISSLQPEDFATYYCLQDYNYPLTFGGGTKVEIK

SEQ ID NO: 3976 - protein, 9 aa, synthetic construct
  REGION 1..9: note = Synthetic
LQDYNYPLT

SEQ ID NO: 3977 - protein, 129 aa, synthetic construct
  REGION 1..129: note = Synthetic
EVQLVESGGGLVKPGGSLRLSCAASGFTFSTYTMNWVRQAPGKGLEWVSSISSRGNYIFYADSVKGRFTISRDNAKNSLYLQMNSLRAEDTAVYYCAREKPPAYSYDTSGYYPDGFDIWGQGTMVTVSS

SEQ ID NO: 3978 - protein, 22 aa, synthetic construct
  REGION 1..22: note = Synthetic
AREKPPAYSYDTSGYYPDGFDI

SEQ ID NO: 3979 - protein, 108 aa, synthetic construct; identical to SEQ ID NO: 344
  REGION 1..108: note = Synthetic

SEQ ID NO: 3980 - protein, 10 aa, synthetic construct
  REGION 1..10: note = Synthetic
QQYYNWPPWT

SEQ ID NO: 3981 - protein, 121 aa, synthetic construct
  REGION 1..121: note = Synthetic
QVQLVQSGAEVKKPGASVKVSCKASGYTFTTYGISWLRQAPGQGLQWMGWISPNNGNTHYAQIVQGRVSMTTDTSTSTAYMELRSLRSDDTAVYYCGRDRPTTAIFGVVDYWGQGTLVTVS

SEQ ID NO: 3982 - protein, 15 aa, synthetic construct
  REGION 1..15: note = Synthetic
GRDRPTTAIFGVVDY

SEQ ID NO: 3983 - protein, 107 aa, synthetic construct
  REGION 1..107: note = Synthetic
DIQMTQSPSSLSASVGDRVTITCRASQRISTYLNWYQQKPGKAPKLLIQAASSLQGGVPSRFSGSGSGTDFTLTISSLQPEDFATYYCQQSYSTPFTFGPGTKVDVK

SEQ ID NO: 3984 - protein, 9 aa, synthetic construct
  REGION 1..9: note = Synthetic
QQSYSTPFT

SEQ ID NO: 3985 - protein, 124 aa, synthetic construct
  REGION 1..124: note = Synthetic
QVQLQESGPGLVKPSQTLSLTCSVSGGSISRGGYYWSWIRQHPGKGLEWIGYIHDSGSTYYTPSLQSRVTISIDTSKNQFSLKLTSVTAADTAIYYCASGRINFDILTGPFDYWGQGTLVTVSS

SEQ ID NO: 3986 - protein, 16 aa, synthetic construct
  REGION 1..16: note = Synthetic
ASGRINFDILTGPFDY

SEQ ID NO: 3987 - protein, 112 aa, synthetic construct
  REGION 1..112: note = Synthetic
DIVMTQSPDSLAVSLGERATINCKSSQSVLYSPNNKNFLAWYQQKPGQPPKLLIYWASTRESGVPDRFSGGGSGTDFTLTISSLQAEDVAVYYCQQYYSYRTFGQGTKVEIK

SEQ ID NO: 3988 - protein, 8 aa, synthetic construct
  REGION 1..8: note = Synthetic
QQYYSYRT

SEQ ID NO: 3989 - protein, 125 aa, synthetic construct
  REGION 1..125: note = Synthetic
EVQLVESGGGLVKPGGSLRLSCAASGFTFSSYSMNWVRQAPGKGLEWVSSISSSSNFIYYADSVKGRFTISRDNAKNSVYLQMNSLRAEDTAVYYCAREWNYYDSRGYYYGEYDYWGQGTLVTVS

SEQ ID NO: 3990 - protein, 19 aa, synthetic construct
  REGION 1..19: note = Synthetic
AREWNYYDSRGYYYGEYDY

SEQ ID NO: 3991 - protein, 108 aa, synthetic construct; identical to SEQ ID NO: 74
  REGION 1..108: note = Synthetic

SEQ ID NO: 3992 - protein, 9 aa, synthetic construct
  REGION 1..9: note = Synthetic
QQYGSSPRT

SEQ ID NO: 3993 - protein, 121 aa, synthetic construct
  REGION 1..121: note = Synthetic
QVQLQESGPGLVKPSQTLSLTCTVSGGPVSSGDYYWTWIRQPPGKGLEWIGNVYYSGSTYYNPSLRSRLTISIDRSKNQFSLKLTSVTAADTAVYYCARTTSVVTPDFAYWGQGSLVTVSS

SEQ ID NO: 3994 - protein, 13 aa, synthetic construct
  REGION 1..13: note = Synthetic
ARTTSVVTPDFAY

SEQ ID NO: 3995 - protein, 109 aa, synthetic construct
  REGION 1..109: note = Synthetic
EIVLTQSPXTLSLSPGERATLSCRASQSVSSYLAWYQQKPGQAPRLLIYDATNRATGIPARFSGSGSGTDFTLTISSLEPEDFAVYYCQQRGKWPPLITFGQGTRLEIK

SEQ ID NO: 3996 - protein, 11 aa, synthetic construct
  REGION 1..11: note = Synthetic
QQRGKWPPLIT

SEQ ID NO: 3997 - protein, 128 aa, synthetic construct; identical to SEQ ID NO: 63
  REGION 1..128: note = Synthetic

SEQ ID NO: 3998 - protein, 21 aa, synthetic construct
  REGION 1..21: note = Synthetic
ATAFAIRGTSDSYHYYYGMDV

SEQ ID NO: 3999 - protein, 112 aa, synthetic construct
  REGION 1..112: note = Synthetic
DIVMTQTPLSSPVTLGQPASISCRSSQSLVHSDGNTYLSWLQQRPGQPPRLLIYMISNRFSGVPDRFSGSGAGTDFTLKISRVEAEDVGLYYCMQTTQFPYTSGQGTNPEIK

SEQ ID NO: 4000 - protein, 9 aa, synthetic construct
  REGION 1..9: note = Synthetic
MQTTQFPYT

SEQ ID NO: 4001 - protein, 129 aa, synthetic construct; identical to SEQ ID NO: 67
  REGION 1..129: note = Synthetic

SEQ ID NO: 4002 - protein, 23 aa, synthetic construct
  REGION 1..23: note = Synthetic
AKDQGDEDSSGWLRPHITFAMDV

SEQ ID NO: 4003 - protein, 107 aa, synthetic construct; identical to SEQ ID NO: 68
  REGION 1..107: note = Synthetic

SEQ ID NO: 4004 - protein, 9 aa, synthetic construct
  REGION 1..9: note = Synthetic
LQYNSYPPT

SEQ ID NO: 4005 - protein, 131 aa, synthetic construct
  REGION 1..131: note = Synthetic
EVQLVESGGGLVKPGGSLRLSCAASGFIFNNAWMSWVRQAPGKGLEWVGRIKSKTDGGTTDYAAPVKGRFTISRDDSKNTLYLQMNSLKTEDTAVYYCTTVTRSLTLFQGVIIANYAMDVWGQGTTVTVSS

SEQ ID NO: 4006 - protein, 22 aa, synthetic construct
  REGION 1..22: note = Synthetic
TTVTRSLTLFQGVIIANYAMDV

SEQ ID NO: 4007 - protein, 107 aa, synthetic construct
  REGION 1..107: note = Synthetic
DIQMTQSPSSLSASVGDRVTITCRATQSISNYLNWYQQKTGKAPKLLIYAASSLQSGVPSRFSGSGSGTDFTLTISSLQPEDFATYYCQQTYNTPFTFGTGTKVDIK

SEQ ID NO: 4008 - protein, 9 aa, synthetic construct
  REGION 1..9: note = Synthetic
QQTYNTPFT

SEQ ID NO: 4009 - protein, 130 aa, synthetic construct; identical to SEQ ID NO: 69
  REGION 1..130: note = Synthetic

SEQ ID NO: 4010 - protein, 23 aa, synthetic construct
  REGION 1..23: note = Synthetic
ARDRVDSSTWYTVGYYYYNGMDV

SEQ ID NO: 4011 - protein, 107 aa, synthetic construct
  REGION 1..107: note = Synthetic
DIQLTQSPSFLSSSVGDRVTITCRASQDISSHLAWYQQRPGKAPKLLIYAASTLQSGVPSRFSGSESGTEFTLTISSLQPEDFATYFCQQLNTYPLTFGGGTTVAIK

SEQ ID NO: 4012 - protein, 9 aa, synthetic construct
  REGION 1..9: note = Synthetic
QQLNTYPLT

SEQ ID NO: 4013 - protein, 123 aa, synthetic construct
  REGION 1..123: note = Synthetic
QVQLVQSGAEVKKPGASVKISCKASGYIFSNNFIHWVRQAPGQGLEWMGIINPSGGSATYAQKLQGRVTMTSDTSTSTVYVELTSLRSEDTAVYYCAREGLVVVVPARPLDLWGQGTLVTVSS

SEQ ID NO: 4014 - protein, 16 aa, synthetic construct
  REGION 1..16: note = Synthetic
AREGLVVVVPARPLDL

SEQ ID NO: 4015 - protein, 109 aa, synthetic construct
  REGION 1..109: note = Synthetic
EIVLTQSPATLSLSPGERATLSCRPSQSVSRYLAWYQQKPGQAPRLLIYDASNRATGIPARFSGSWSGTDFTLTISSLEPEDFAVYYCQQRGSWPPELTFGGGTKVEIK

SEQ ID NO: 4016 - protein, 11 aa, synthetic construct
  REGION 1..11: note = Synthetic
QQRGSWPPELT

SEQ ID NO: 4017 - protein, 121 aa, synthetic construct
  REGION 1..121: note = Synthetic
QVQLVQSGAEVKKPGASVKVSCKVSGYTLVELSLHWVRQAPGKGLEWMGGFDPEEAKTIYAQNFQGRVIMTEDTSTDTAYMELNRLRSEDTAVYYCAVGPPFPRMGWLDPWGQGTLVTVSS

SEQ ID NO: 4018 - protein, 14 aa, synthetic construct
  REGION 1..14: note = Synthetic
AVGPPFPRMGWLDP

SEQ ID NO: 4019 - protein, 106 aa, synthetic construct
  REGION 1..106: note = Synthetic
DIQMTQSPSTLSTSVGDRVTITCRASQSVSTWLAWYQQKPGKAPNLLIYKASALKTGVPSRFSGSGSGTEFTLTISSLQPDDFATYYCQQYNTSWTFGQGTKVEIK

SEQ ID NO: 4020 - protein, 8 aa, synthetic construct
  REGION 1..8: note = Synthetic
QQYNTSWT

SEQ ID NO: 4021 - protein, 124 aa, synthetic construct; identical to SEQ ID NO: 39
  REGION 1..124: note = Synthetic

SEQ ID NO: 4022 - protein, 17 aa, synthetic construct
  REGION 1..17: note = Synthetic
ARHNSTYPYYYFYGMDV

SEQ ID NO: 4023 - protein, 107 aa, synthetic construct
  REGION 1..107: note = Synthetic
AIQMTQSPSSLSAFVGDRVTITCRASQGIRNDLGWYQQKSGKAPKLLIYAASGLQSGVPSRFSGSGSGTDFTLTISSLQPEDFATYYCLQDHTYPLTFGGGTKVEIK

SEQ ID NO: 4024 - protein, 9 aa, synthetic construct
  REGION 1..9: note = Synthetic
LQDHTYPLT

SEQ ID NO: 4025 - protein, 125 aa, synthetic construct
  REGION 1..125: note = Synthetic
QVQLVESGGGLVQPGRSLRLSCAASGFTFSTYAMHWVRQAPGRGLEWVALISYDGSNTFYADSVKGRFTISRDNSKNTLYLQMNSLKPEDTALYYCARDSAPGLVGPTTWHLQHWGQGTLVTVSS

SEQ ID NO: 4026 - protein, 18 aa, synthetic construct
  REGION 1..18: note = Synthetic
ARDSAPGLVGPTTWHLQH

SEQ ID NO: 4027 - protein, 104 aa, synthetic construct
  REGION 1..104: note = Synthetic
EIVLTQSPGTLSLSPGERATLSCRASQSISSSSLAWYQQKPGQAPRLLIYGASSRATGIPDRFSGSGSGTDFTLTISRLEPEDFALYYCQFTWTFGQGTKVEIK

SEQ ID NO: 4028 - protein, 5 aa, synthetic construct
  REGION 1..5: note = Synthetic
QFTWT

SEQ ID NO: 4029 - protein, 125 aa, synthetic construct
  REGION 1..125: note = Synthetic
EVQLLESGGGLVQPGGSLRLSCAASGFTFTSYAMTWVRQAPGKGLEWVSAISGSGGSKYYADFVKGRFTISRDNSKDTLYLQMNSLRAEDTAVYYCAKGGPQGDMIVVVDAFDFWGQGTMVTVSS

SEQ ID NO: 4030 - protein, 18 aa, synthetic construct
  REGION 1..18: note = Synthetic
AKGGPQGDMIVVVDAFDF

SEQ ID NO: 4031 - protein, 107 aa, synthetic construct
  REGION 1..107: note = Synthetic
EIVMTQSPATLSVSPGERATLSCRASQSVSSNLAWYQQKPGQAPRLLIYGASTRATGIPARFSGSGSGTEFTLTISGLQSEDFAVYFCQQYNNWPFTFGPGTKVDIK

SEQ ID NO: 4032 - protein, 9 aa, synthetic construct
  REGION 1..9: note = Synthetic
QQYNNWPFT

SEQ ID NO: 4033 - protein, 130 aa, synthetic construct
  REGION 1..130: note = Synthetic
QVQLVESGGGVVQPGRSLRLSCAASGFTFSKYALHWVRQAPGKGLEWVADISFDGSNNHHADSVKGRFTTSRDNSKNTMYLQMNSLRAEDTAVYYCARDFVLCSSSTCRGGVFLGGMDVWGQGTTVTVSS

SEQ ID NO: 4034 - protein, 23 aa, synthetic construct
  REGION 1..23: note = Synthetic
ARDFVLCSSSTCRGGVFLGGMDV

SEQ ID NO: 4035 - protein, 107 aa, synthetic construct
  REGION 1..107: note = Synthetic
EIVLTQSPATLSLSPGERATLSCRASQSVGSYLAWYQQVPGQAPRLLIYDASNRAPGIPPRFSGSGSGTDFTLTISSLEPADFAVYYCQQRSNWPFTFGGGTKVEIK

SEQ ID NO: 4036 - protein, 9 aa, synthetic construct
  REGION 1..9: note = Synthetic
QQRSNWPFT

SEQ ID NO: 4037 - protein, 122 aa, synthetic construct
  REGION 1..122: note = Synthetic
QLQLQESGPGLVKPSETLSLTCTVSGGSLSISYYWGWIRQPPGKGLEWIGNIYYRGSTYYNPSLESRVIISVDTSKNQFSLKLSSVTAADTAVYYCARLWDTVNYYDGMDVWGQGTTVTVSS

SEQ ID NO: 4038 - protein, 15 aa, synthetic construct
  REGION 1..15: note = Synthetic
ARLWDTVNYYDGMDV

SEQ ID NO: 4039 - protein, 106 aa, synthetic construct
  REGION 1..106: note = Synthetic
DIQMTQSPSSLSASVGDRVTITCRASQDISNYLAWFQQKPGKAPKSLIYAASSLQRGVPSKFSGSGSGTDFTLTISSLQPEDFATYYCQQYHSYPLTFGGGTKVEI

SEQ ID NO: 4040 - protein, 9 aa, synthetic construct
  REGION 1..9: note = Synthetic
QQYHSYPLT

SEQ ID NO: 4041 - protein, 124 aa, synthetic construct
  REGION 1..124: note = Synthetic
EVQLVESGGGLVKPGGSLRLSCAASGFTFSSYNMNWVRQAPGKGLEWVSSISSSSSFIYYADSMKGRFTISRDNAQNSLYLQMNSLRVEDTAVYYCARWLRRYGDYISDAFDLWGQGTMVTVSA

SEQ ID NO: 4042 - protein, 17 aa, synthetic construct
  REGION 1..17: note = Synthetic
ARWLRRYGDYISDAFDL

SEQ ID NO: 4043 - protein, 108 aa, synthetic construct
  REGION 1..108: note = Synthetic
EIVMTQSPATLSVSPGERATLSCRASESVSSNLAWYQQKPGQAPRLLIYGASTRATGVPARFSGSGSVTEFTLTISSLQSEDFAVYYCQHYHNWPPWTFGQGTKVEIK

SEQ ID NO: 4044 - protein, 10 aa, synthetic construct
  REGION 1..10: note = Synthetic
QHYHNWPPWT

SEQ ID NO: 4045 - protein, 124 aa, synthetic construct
  REGION 1..124: note = Synthetic
QVQLQESGPGLVKPSQTLSLTCTVSGGSIGSGGYWSWIRQHPGTGLEWIGYIYYTGSTYYNPSFKSRLSISVDTSNNQFSLKLSSVTAADTAVYYCARDRPFFGSESPHAFDIWGQGTLVTVSS

SEQ ID NO: 4046 - protein, 17 aa, synthetic construct
  REGION 1..17: note = Synthetic
ARDRPFFGSESPHAFDI

SEQ ID NO: 4047 - protein, 106 aa, synthetic construct; identical to SEQ ID NO: 66
  REGION 1..106: note = Synthetic

SEQ ID NO: 4048 - protein, 8 aa, synthetic construct
  REGION 1..8: note = Synthetic
QQYNSYRT

SEQ ID NO: 4049 - protein, 122 aa, synthetic construct
  REGION 1..122: note = Synthetic
QVQLQESGPGLVKPSETLSLTCTVSGGSISTYYWSWIRQPPGKGLEWIGYIYYSGSTNYNYSLKSRVTISVDTSKNQFSLKLTSVTAADTAVYYCAREGSGSNYKNWYFDLWGRGTLVTVSS

SEQ ID NO: 4050 - protein, 16 aa, synthetic construct
  REGION 1..16: note = Synthetic
AREGSGSNYKNWYFDL

SEQ ID NO: 4051 - protein, 113 aa, synthetic construct
  REGION 1..113: note = Synthetic
DIVMTQSPDSLAVSLGERATINCKSSQSVLYSSNDKNYLAWYQQKPGQPPKLLIYWASTRESGVPDRFSGSGSGTDFTLTISSLQAEDVAVYYCQQYYNAPRTFGQGTKVEIK

SEQ ID NO: 4052 - protein, 9 aa, synthetic construct
  REGION 1..9: note = Synthetic
QQYYNAPRT

SEQ ID NO: 4053 - protein, 128 aa, synthetic construct; identical to SEQ ID NO: 61
  REGION 1..128: note = Synthetic

SEQ ID NO: 4054 - protein, 21 aa, synthetic construct
  REGION 1..21: note = Synthetic
SAGVAVTGTPENYSYYYGMDV

SEQ ID NO: 4055 - protein, 107 aa, synthetic construct; identical to SEQ ID NO: 62
  REGION 1..107: note = Synthetic

SEQ ID NO: 4056 - protein, 9 aa, synthetic construct
  REGION 1..9: note = Synthetic
QQYNDWPRG

SEQ ID NO: 4057 - protein, 119 aa, synthetic construct
  REGION 1..119: note = Synthetic
EVQLVESGGGLVKRGGSLRLSCTASGFTFTSYTMNWVRQAPGKGLEWVSSISSSSSYIYYTDSVKGRFTISRDNAKNSLFLQMNSLRAEDTAVYYCAREGGVNGAFDIWGQGTMVTVSS

SEQ ID NO: 4058 - protein, 12 aa, synthetic construct
  REGION 1..12: note = Synthetic
AREGGVNGAFDI

SEQ ID NO: 4059 - protein, 107 aa, synthetic construct
  REGION 1..107: note = Synthetic
DIQMTQSPSSLSASVGDRVTITCRASQSISSYLNWYQQKPGKAPKLLIYAASSLQSGVPSRFSGSGSGTDFTLTISSLQPEDFATYYCHQSYSTPFPFGPGTKVDIK

SEQ ID NO: 4060 - protein, 9 aa, synthetic construct
  REGION 1..9: note = Synthetic
HQSYSTPFP

SEQ ID NO: 4061 - protein, 128 aa, synthetic construct; identical to SEQ ID NO: 57
  REGION 1..128: note = Synthetic

SEQ ID NO: 4062 - protein, 21 aa, synthetic construct
  REGION 1..21: note = Synthetic
ATATALQWLDGAYHYHYGMDV

SEQ ID NO: 4063 - protein, 112 aa, synthetic construct
  REGION 1..112: note = Synthetic
DIVMTQTPLSSPVTLGQPASISCRSSQSLVHSDGNTYLSWLQQRPGQPPRLLIYKISNRVSGVPDRFSGSGAGTDFTLKISRVEAEDVGVYYCMQATQFPCTFGQGTKLEMK

SEQ ID NO: 4064 - protein, 9 aa, synthetic construct
  REGION 1..9: note = Synthetic
MQATQFPCT

SEQ ID NO: 4065 - protein, 130 aa, synthetic construct; identical to SEQ ID NO: 33
  REGION 1..130: note = Synthetic

SEQ ID NO: 4066 - protein, 23 aa, synthetic construct
  REGION 1..23: note = Synthetic
ARDFVLCSSSTCRGGVFLGGMDL

SEQ ID NO: 4067 - protein, 107 aa, synthetic construct; identical to SEQ ID NO: 34
  REGION 1..107: note = Synthetic

SEQ ID NO: 4068 - protein, 9 aa, synthetic construct
  REGION 1..9: note = Synthetic
QQRSNWPFS

SEQ ID NO: 4069 - protein, 122 aa, synthetic construct
  REGION 1..122: note = Synthetic
QVQLVESGGGVVQPGRSLRLSCAASGFTFSSYAIHWVRQAPGKGLEWVAVISFDGSKKYYADSVEGRFTISRENSNNTLYLQMNSLRPEDTAVYYCARGSGGWYPWGPFDYWGQGTQVTVSS

SEQ ID NO: 4070 - protein, 15 aa, synthetic construct
  REGION 1..15: note = Synthetic
ARGSGGWYPWGPFDY

SEQ ID NO: 4071 - protein, 107 aa, synthetic construct
  REGION 1..107: note = Synthetic
DIQMTQSPSSLSASVGDRVTITCQASQDISNYLNWYQQKPGKAPKLLIYDASNLETGVPSSFSGSGSGTDFSFTISSLQPEDIATYYCQQYDTLPVTFGPGTKVDIK

SEQ ID NO: 4072 - protein, 9 aa, synthetic construct
  REGION 1..9: note = Synthetic
QQYDTLPVT

SEQ ID NO: 4073 - protein, 130 aa, synthetic construct
  REGION 1..130: note = Synthetic
QVQLVQSGAEVKKPGASVKVSCTVSGYTLTELSMHWVRQAPGKGLEWMGGFDPEDAETIYAQKFQGRLTMTEDTSTDTAYMELSSLRSEDAAVYYCAAALAINTIQGPTDYTYYYGMDVWGQGTTVTVSS

SEQ ID NO: 4074 - protein, 23 aa, synthetic construct
  REGION 1..23: note = Synthetic
AAALAINTIQGPTDYTYYYGMDV

SEQ ID NO: 4075 - protein, 112 aa, synthetic construct
  REGION 1..112: note = Synthetic
DIVMTQTPLSSPVTLGQPASISCRSSQSLVHSDGNTYLSWLHQRPGQPPRLLIYKISNRFSGVPDRFSASGAGTDFTLKISRVEAEDVGVYYCTQATQFPYTFGQGTKLEIK

SEQ ID NO: 4076 - protein, 9 aa, synthetic construct
  REGION 1..9: note = Synthetic
TQATQFPYT

SEQ ID NO: 4077 - protein, 124 aa, synthetic construct
  REGION 1..124: note = Synthetic
EVQLVESGGGLVQPGGSLRLSCAASGFTFSDYWMSWVRQAPGKGLEWVANINQDGSDHYSVDSVMGRFTISRDNAKKSLYLHMDSLRAEDTAVYYCARHNSTYPHYYFYGMDVWGQGTTVTVSS

SEQ ID NO: 4078 - protein, 17 aa, synthetic construct
  REGION 1..17: note = Synthetic
ARHNSTYPHYYFYGMDV

SEQ ID NO: 4079 - protein, 107 aa, synthetic construct
  REGION 1..107: note = Synthetic
AIQMTQSPSSLSASVGDRVTITCRASQGIRNDLGWYQQKSGKAPKLLIYAASGLQSGVPSRFSGSGSGTDFTLTISSLQPEDFATYYCLQDHTYPLTFGGGTKVEIK

SEQ ID NO: 4080 - protein, 9 aa, synthetic construct
  REGION 1..9: note = Synthetic
LQDHTYPLT

SEQ ID NO: 4081 - protein, 124 aa, synthetic construct
  REGION 1..124: note = Synthetic
EVQLVESGGGLVQPGGSLRLSCAASGFTFNNYWMSWVRQAPGKGLEWVANMNEDGSETYYVDSVRGRFTISRDNAKNSLSLQMSSLRADDTAVYYCAREGWFREFPYWYGLDVWGQGTTVTVSS

SEQ ID NO: 4082 - protein, 17 aa, synthetic construct
  REGION 1..17: note = Synthetic
AREGWFREFPYWYGLDV

SEQ ID NO: 4083 - protein, 107 aa, synthetic construct
  REGION 1..107: note = Synthetic
DIQMTQSPSSLSASVGDRVTITCQASQDISNYLNWYQQKPGKAPKLLIYDASNLETGVPSRFSGSGSGTDFTFTISSLQPEDIATYYCQQYDNLPYSFGQGTKLEIK

SEQ ID NO: 4084 - protein, 9 aa, synthetic construct
  REGION 1..9: note = Synthetic
QQYDNLPYS

SEQ ID NO: 4085 - protein, 129 aa, synthetic construct
  REGION 1..129: note = Synthetic
QVQLVESGGGVVQPGRSLRLSCAASGFTFSSYGIHWVRQAPGKGLEWVAVISYDGSDKYYEDSVKGRFTISRENSKNTLYLQMNSLRAEDTAVYYCAKDRGLRVLEWVATSLSGDMDVWGQGTTVTVSS

SEQ ID NO: 4086 - protein, 22 aa, synthetic construct
  REGION 1..22: note = Synthetic
AKDRGLRVLEWVATSLSGDMDV

SEQ ID NO: 4087 - protein, 107 aa, synthetic construct
  REGION 1..107: note = Synthetic
DIQMTQSPSTLSASVGDRVTITCRASQSISSWLAWYQQKPGKASKLLIYKASSLETGVPSRFSGSASGTEFTLTISGLQPDDFATYYCQQYNSYPLTFGGGTKVEIK

SEQ ID NO: 4088 - protein, 9 aa, synthetic construct
  REGION 1..9: note = Synthetic
QQYNSYPLT

SEQ ID NO: 4089 - protein, 118 aa, synthetic construct
  REGION 1..118: note = Synthetic
QMQLVQSGPEVKKPGTSVKVSCKASGFTFPSSAMQWVRQARGQRLEWIGWIVVGSGNTNYAQKFQERVTITRDMSTSTAYMELTSLRSEDTAVYYCAATGLLGELFDWGQGTLVTVSS

SEQ ID NO: 4090 - protein, 11 aa, synthetic construct
  REGION 1..11: note = Synthetic
AATGLLGELFD

SEQ ID NO: 4091 - protein, 108 aa, synthetic construct; identical to SEQ ID NO: 486
  REGION 1..108: note = Synthetic

SEQ ID NO: 4092 - protein, 9 aa, synthetic construct
  REGION 1..9: note = Synthetic
QQYGSSPRT

SEQ ID NO: 4093 - protein, 118 aa, synthetic construct
  REGION 1..118: note = Synthetic
QVQLQESGPGLVKPSGTLSLTCVVSGGSMSSNYWWSWVRQPPGKGLEWIGEIYHSGSTNYSPSLKSRVTISVDKSKNQFSLNLTSVTAADAAVYYCARDPMGDNGMDVWGQGTTVTVS

SEQ ID NO: 4094 - protein, 12 aa, synthetic construct
  REGION 1..12: note = Synthetic
ARDPMGDNGMDV

SEQ ID NO: 4095 - protein, 109 aa, synthetic construct
  REGION 1..109: note = Synthetic
EIVMTQSPATLSVSPGERATLSCRASQTIGTNLAWYQQKPGQAPRLLIYGASTRATGIPARFSGSGSETEFTLTVGSLQSEDFAVYFCQQYNNWPPAITFGQGTRLEIK

SEQ ID NO: 4096 - protein, 11 aa, synthetic construct
  REGION 1..11: note = Synthetic
QQYNNWPPAIT

SEQ ID NO: 4097 - protein, 120 aa, synthetic construct
  REGION 1..120: note = Synthetic
QVQLVQSGAEVKKPGASVKLSCKLSGYTLPEVSIHWVRQAPGKGLEWMGGFDPEDGDTRYAQKFLGRVAMTEDTSTDTAYMDLSSLRSEDTAVYYCTMGSPLAGGWFHPWGQGTLVTVSS

SEQ ID NO: 4098 - protein, 13 aa, synthetic construct
  REGION 1..13: note = Synthetic
TMGSPLAGGWFHP

SEQ ID NO: 4099 - protein, 107 aa, synthetic construct
  REGION 1..107: note = Synthetic
EIVLTQSPGTLSLSPGERATLSCRASQSVSSSYLAWYQQKFGQAPRLLMYGASIRATGIPDRFSGSGSGTDFTLTISRLEPEDFAVYYCQQYGSSSYTFGQGTKLEI

SEQ ID NO: 4100 - protein, 9 aa, synthetic construct
  REGION 1..9: note = Synthetic
QQYGSSSYT

SEQ ID NO: 4101 - protein, 125 aa, synthetic construct
  REGION 1..125: note = Synthetic
QVQLVESGGGLVKPGGSLRLSCAASGFTFSDHSMNWIRQLPGKGLEWVSYISSSGNTKTYADSVKGRFTISRDNSKNSLSLQMRSLRAEDTAVYYCVRDQGDLGVAVPEEPFDIWGQGTLVTVSS

SEQ ID NO: 4102 - protein, 18 aa, synthetic construct
  REGION 1..18: note = Synthetic
VRDQGDLGVAVPEEPFDI

SEQ ID NO: 4103 - protein, 113 aa, synthetic construct
  REGION 1..113: note = Synthetic
DVVMTQSPLSLPVTLGQPASISCRSSQSLIYTDGNTYLNWFQQRPGQSPRRLIYKVSKRDSGVPDRFSGSGSGTNFTLRISRVEAEDVGVYYCLQATHWPLRTFGPGTKVEIK

SEQ ID NO: 4104 - protein, 10 aa, synthetic construct
  REGION 1..10: note = Synthetic
LQATHWPLRT

SEQ ID NO: 4105 - protein, 128 aa, synthetic construct
  REGION 1..128: note = Synthetic
QVQLQESGPRLVKPSQTLSLTCTVSGGSISGGDYYWTWIRQPPGKGLEWIGYIYYSGSTFYNPSLNSRITMSLDTSKNQFSLRLASVTAADTAVYYCVREAYNSDVLWSGLNGPFDQWGPGTLVTVSS

SEQ ID NO: 4106 - protein, 20 aa, synthetic construct
  REGION 1..20: note = Synthetic
VREAYNSDVLWSGLNGPFDQ

SEQ ID NO: 4107 - protein, 107 aa, synthetic construct
  REGION 1..107: note = Synthetic
DIQMTQSPSTLSASVGDRVTITCRASQSISSWLAWYQQKPGKAPKLLIYKASSLESGVPSRFSGSGSGTEFTLTISSLQPDDFATYYCQQYNSYSWTFGQGTKVEIK

SEQ ID NO: 4108 - protein, 9 aa, synthetic construct
  REGION 1..9: note = Synthetic
QQYNSYSWT

SEQ ID NO: 4109 - protein, 121 aa, synthetic construct
  REGION 1..121: note = Synthetic
QVQLVQSGAEVKKPGASVKVSCNVSGYTLIELSMHWVRQAPGKGLEWMGGFDPENTETIYAQKFQGRVSMSEDTSTDTAYMELSSLSSEDTAVYYCATLYAISGSGPLWFWGQGTLVTVSS

SEQ ID NO: 4110 - protein, 14 aa, synthetic construct
  REGION 1..14: note = Synthetic
ATLYAISGSGPLWF

SEQ ID NO: 4111 - protein, 107 aa, synthetic construct
  REGION 1..107: note = Synthetic
DIQLTQSPSFLSASVGDRVAITCRASQGISSYLAWYQQKPGKAPKFLIYAASTLQSGVPSRFSGSGSGTEFTLTITSLQPEDFATYYCQQVNNYPLTFGGGSKVEIK

SEQ ID NO: 4112 - protein, 9 aa, synthetic construct
  REGION 1..9: note = Synthetic
QQVNNYPLT

SEQ ID NO: 4113 - protein, 127 aa, synthetic construct
  REGION 1..127: note = Synthetic
QLQLQESGPGLVKPSGTLSLTCSVSGGSINSDSYFWAWIRQPPGRGLEYIGSGSSGGTTYYNPSLKSRVTIYVDTSKNQFSLNLNSVTAADTAVYHCARHVPTTIFGVVTHNWLDPWGQGTLVTVSS

SEQ ID NO: 4114 - protein, 19 aa, synthetic construct
  REGION 1..19: note = Synthetic
ARHVPTTIFGVVTHNWLDP

SEQ ID NO: 4115 - protein, 116 aa, synthetic construct
  REGION 1..116: note = Synthetic
QFVLTQPPSSSASPGESARLTCTLPSDINVATHNIYWYQRKPGRPPRYLLHYHSDSNKGRGSGVPSRFSGSKDASANTGILFISGLQSEDEADYYCMIWPSNASGVFGGGTKLTVL

SEQ ID NO: 4116 - protein, 10 aa, synthetic construct
  REGION 1..10: note = Synthetic
MIWPSNASGV

SEQ ID NO: 4117 - protein, 121 aa, synthetic construct
  REGION 1..121: note = Synthetic
QVQLVQSGAEVKKPGSSVKVSCKVSGGSFSSYAISWVRQAPGQGLEWMGRIIPFVNIPNYAQKFQDRVTITADKSTSTAYMELRSLRSEDTAVYYCARALIAVAGSYFDYWGQGTLVTVSS

SEQ ID NO: 4118 - protein, 14 aa, synthetic construct
  REGION 1..14: note = Synthetic
ARALIAVAGSYFDY

SEQ ID NO: 4119 - protein, 108 aa, synthetic construct
  REGION 1..108: note = Synthetic
SYVLTQPPSVSVAPGKTARITCGGNNIGSKSVHWYQRKPGQAPVLVVYDDSDRPSGIPERFSGSNSGNTATLTISRVEAGDEADYYCQVWDDSSDHPVFGGGTKLTVL

SEQ ID NO: 4120 - protein, 11 aa, synthetic construct
  REGION 1..11: note = Synthetic
QVWDDSSDHPV

SEQ ID NO: 4121 - protein, 122 aa, synthetic construct
  REGION 1..122: note = Synthetic
QVQLVESGGGVVQPGRSLRLSCAASGFIFSGYGMHWVRQAPGKGLEWVAVISYEGSIKYYADSMKGRFTISRDNSRSTVYLQVNSLRAEDTAVYYCAKEGRQWLLDSYFEDWGQGTLVTVSS

SEQ ID NO: 4122 - protein, 15 aa, synthetic construct
  REGION 1..15: note = Synthetic
AKEGRQWLLDSYFED

SEQ ID NO: 4123 - protein, 105 aa, synthetic construct
  REGION 1..105: note = Synthetic
SYVXTQPPSVSVSPGQTAGITCSGDTLGKKHVSWYQQRPRQPPVLVIYEDTKRPSGIPERFSGSNSGNTATLTISGTQALDEADYYCQAWDLHTGAFGGGTRLTV

SEQ ID NO: 4124 - protein, 9 aa, synthetic construct
  REGION 1..9: note = Synthetic
QAWDLHTGA

SEQ ID NO: 4125 - protein, 124 aa, synthetic construct
  REGION 1..124: note = Synthetic
QVQLVESGGDLVKPGGSLILSCAASRFTFSNYFMGWIRQAPGKGLEWISYISSSGNTRHYADSVRGRFTISRDNAKNSLYLQMNSLRTEDTAVYYCARDSTRWATQPLFGYDYWGQGTLVTVSS

SEQ ID NO: 4126 - protein, 17 aa, synthetic construct
  REGION 1..17: note = Synthetic
ARDSTRWATQPLFGYDY

SEQ ID NO: 4127 - protein, 109 aa, synthetic construct
  REGION 1..109: note = Synthetic
QFVLTQPPSVSGSPGQSVTISCIGTSSDVGSFNRVSWYQQPPGKAPKLIICEVTNRPSGVPDRFSGSKSGNTASLTISGLQAEDEAEYYCSSYTSSNTLVFGAGTKVTV

SEQ ID NO: 4128 - protein, 10 aa, synthetic construct
  REGION 1..10: note = Synthetic
SSYTSSNTLV

SEQ ID NO: 4129 - protein, 125 aa, synthetic construct
  REGION 1..125: note = Synthetic
QVQLVQSGAEVTKPGASVKVSCKTSGYTFSSYYIHWVRQAPGQGLEWMAVINPTGTSVTYAQKFQGRVTVTRDTSTTTVYMELTSLRSEDTAVYYCARDVPTYGDYGTSAYGMDVWGQGTTVTVS

SEQ ID NO: 4130 - protein, 19 aa, synthetic construct
  REGION 1..19: note = Synthetic
ARDVPTYGDYGTSAYGMDV

SEQ ID NO: 4131 - protein, 107 aa, synthetic construct
  REGION 1..107: note = Synthetic
SYVLTQPPSVSVSPGQTARITCSGHALPKQHAYWYQQKSGQAPVVVIYQDSERPSGIPERFSGSSSGTTVTLTISGVQAEDEADYYCQSVDSSGTYVVFGGGTKLTV

SEQ ID NO: 4132 - protein, 11 aa, synthetic construct
  REGION 1..11: note = Synthetic
QSVDSSGTYVV

SEQ ID NO: 4133 - protein, 115 aa, synthetic construct; identical to SEQ ID NO: 83
  REGION 1..115: note = Synthetic

SEQ ID NO: 4134 - protein, 8 aa, synthetic construct
  REGION 1..8: note = Synthetic
ARGWYFDY

SEQ ID NO: 4135 - protein, 110 aa, synthetic construct
  REGION 1..110: note = Synthetic
QFVLTQPASVSASPGQSITISCTGTSSDVGSYNLVSWYQQHPGKAPKLMIYEGSKRPSGVSNRFSGSKSGNTASLTISGLQAEDEADYYCFSYAGSSTWVFGGGTKLTVL

SEQ ID NO: 4136 - protein, 10 aa, synthetic construct
  REGION 1..10: note = Synthetic
FSYAGSSTWV

SEQ ID NO: 4137 - protein, 125 aa, synthetic construct
  REGION 1..125: note = Synthetic
QLQLQESGPGLVKPSETLSLTCTVSGGSISSSSYYWGWIRQPPGKGLEWIGSIYYSGSTYYNPSLKSRVTMSVDTSKNQFSLKLSSVTAADTAVYYCARGWDVLVPAARARFDPWGQGTLVTVSS

SEQ ID NO: 4138 - protein, 17 aa, synthetic construct
  REGION 1..17: note = Synthetic
ARGWDVLVPAARARFDP

SEQ ID NO: 4139 - protein, 112 aa, synthetic construct
  REGION 1..112: note = Synthetic
QSVLTQPPSVSGAPGQRVTISCTGSSSNIGAGYDVHWYQQLPGTAPKLLIYGNINRPSGVPDRFSGSKSGTSASLAITGLQAEDEADYYCQSYDSSLSGSWVFGGGTKLTVL

SEQ ID NO: 4140 - protein, 12 aa, synthetic construct
  REGION 1..12: note = Synthetic
QSYDSSLSGSWV

SEQ ID NO: 4141 - protein, 124 aa, synthetic construct
  REGION 1..124: note = Synthetic
QVQLVQSGAEVKKPGASVKVSCKVSGYTLPELSIHWVRQAPGKGLEWLGGFDPEDAETIYAQKFQDRVTMTEDTSTDTAYMELSSLRSDDTAVYYCATQFAYCSGDCYTKWDYWGQGTLVTVSS

SEQ ID NO: 4142 - protein, 17 aa, synthetic construct
  REGION 1..17: note = Synthetic
ATQFAYCSGDCYTKWDY

SEQ ID NO: 4143 - protein, 110 aa, synthetic construct
  REGION 1..110: note = Synthetic
QFVLTQPASVSGSPGQSITISCTATSSDVGNYKFVSWYQHHPGKAPKLIIYEGSKRPSGVSNRFSGSKSGNTASLTISGLQAEDEADYSCCSYAGSRTVVFGGGTKVTVL

SEQ ID NO: 4144 - protein, 10 aa, synthetic construct
  REGION 1..10: note = Synthetic
CSYAGSRTVV

SEQ ID NO: 4145 - protein, 125 aa, synthetic construct; identical to SEQ ID NO: 89
  REGION 1..125: note = Synthetic

SEQ ID NO: 4146 - protein, 18 aa, synthetic construct
  REGION 1..18: note = Synthetic
AKDRESTMTNFKVGGLDV

SEQ ID NO: 4147 - protein, 106 aa, synthetic construct
  REGION 1..106: note = Synthetic
SYVLTQPPSVSVSPGQTANITCSGDELGDKYVCWYQQKPGQSPVMVIFLDDKRPSGIPERFSGSNSGNTATLTISGTQAMDEADYYCQAWDSSTLVFGGGTKLTVL

SEQ ID NO: 4148 - protein, 9 aa, synthetic construct
  REGION 1..9: note = Synthetic
QAWDSSTLV

SEQ ID NO: 4149 - protein, 122 aa, synthetic construct
  REGION 1..122: note = Synthetic
QVQLVQSGAEVKKPGASVKVSCKVSGYTLPELSIHWVRQAPGKGLEWMGGFDAEDAETIYAQKFQGRVTMTEDTSTDTAYMELSRLSSEDTAVYYCATVFAVYGMSGYLDYWGQGTLVTVSA

SEQ ID NO: 4150 - protein, 15 aa, synthetic construct
  REGION 1..15: note = Synthetic
ATVFAVYGMSGYLDY

SEQ ID NO: 4151 - protein, 109 aa, synthetic construct
  REGION 1..109: note = Synthetic
QFVLTQPPSVSGSPGQSVTISCTGTSSDVGSYNRVSWYQQPPGTAPKLFIYEVTKRPLGVPDRFSGSKSGNTASLTISGLQAEDEATYYCTSYAGSIMVFGGGTMLTVL

SEQ ID NO: 4152 - protein, 9 aa, synthetic construct
  REGION 1..9: note = Synthetic
TSYAGSIMV

SEQ ID NO: 4153 - protein, 123 aa, synthetic construct
  REGION 1..123: note = Synthetic
EVQLLESGGGLVQPGGSLRLSCAASGFTFTSYAMTWVRQAPGKGLEWVSTLSVSGGSTYYADSVKGRFTISRDNSKNTLYLQMNSLRAEDTAVYYCAKDLHSGIVAAEGIDYWGQGTLVTVSS

SEQ ID NO: 4154 - protein, 16 aa, synthetic construct
  REGION 1..16: note = Synthetic
AKDLHSGIVAAEGIDY

SEQ ID NO: 4155 - protein, 106 aa, synthetic construct
  REGION 1..106: note = Synthetic
SYVLTQPPSVSVSPGQTASITCSGDKLGDKYACWYQQKPGQSPVLVIYQDSKRPSGIPERFSGSNSGNTATLTISGTQAMDEADYYCQAWDSSTGVFGGGTKLTVL

SEQ ID NO: 4156 - protein, 9 aa, synthetic construct
  REGION 1..9: note = Synthetic
QAWDSSTGV

SEQ ID NO: 4157 - protein, 128 aa, synthetic construct; identical to SEQ ID NO: 81
  REGION 1..128: note = Synthetic

SEQ ID NO: 4158 - protein, 21 aa, synthetic construct
  REGION 1..21: note = Synthetic
AKDWAPRYYYDISGYQNTMDV

SEQ ID NO: 4159 - protein, 108 aa, synthetic construct
  REGION 1..108: note = Synthetic
SYVLTQPPSVSVAPGKTARITCGGNNIGSKSVHWYQQKPGQAPVLVVNDDSDRPSGIPERVSGSNSGNTATLTISRVEAGDEADYYCQVWDSSSDHVVFGGGTKLTVL

SEQ ID NO: 4160 - protein, 11 aa, synthetic construct
  REGION 1..11: note = Synthetic
QVWDSSSDHVV

SEQ ID NO: 4161 - protein, 121 aa, synthetic construct
  REGION 1..121: note = Synthetic
EVQLLESGGGLIQPGGSLRLSCTAAGFTFSNYAMSWVRQAPGKGLEWVSTISSSGAATYYADSVKGRFTISRDNSKNRLYLQMDSLTVGDTAEYYCATDPYYSVVRSFGVWGQGTTVTVSS

SEQ ID NO: 4162 - protein, 14 aa, synthetic construct
  REGION 1..14: note = Synthetic
ATDPYYSVVRSFGV

SEQ ID NO: 4163 - protein, 109 aa, synthetic construct
  REGION 1..109: note = Synthetic
QFVLTQPASVSGSPGQSITISCTGTSSDVGSYNLVSWYQQHPHKAPKLMIYEATKRPSGVSDRFSGSKSGYTASLTISGLQAEDEADYYCCSYASSTSFLFGGGTKLTV

SEQ ID NO: 4164 - protein, 10 aa, synthetic construct
  REGION 1..10: note = Synthetic
CSYASSTSFL

SEQ ID NO: 4165 - protein, 128 aa, synthetic construct; identical to SEQ ID NO: 81
  REGION 1..128: note = Synthetic

SEQ ID NO: 4166 - protein, 21 aa, synthetic construct
  REGION 1..21: note = Synthetic
AKDWAPRYYYDISGYQNTMDV

SEQ ID NO: 4167 - protein, 108 aa, synthetic construct; identical to SEQ ID NO: 4159
  REGION 1..108: note = Synthetic

SEQ ID NO: 4168 - protein, 11 aa, synthetic construct
  REGION 1..11: note = Synthetic
QVWDSSSDHVV

SEQ ID NO: 4169 - protein, 124 aa, synthetic construct
  REGION 1..124: note = Synthetic
QVQLVESGGGVVQPGRSLRLSCAASGFIFSNSAMHWVRQAPGKGLEWVAVISYDASNRYYADSVKGRFTISRDNSKNTLYVEMNSLRAEDTAVYYCAKAEHDTSVFYGFRIDYWGQGALVTVSS

SEQ ID NO: 4170 - protein, 17 aa, synthetic construct
  REGION 1..17: note = Synthetic
AKAEHDTSVFYGFRIDY

SEQ ID NO: 4171 - protein, 108 aa, synthetic construct
  REGION 1..108: note = Synthetic
SYVLTQPPSVSVAPGETASITCGGNNIGTKSVHWHKQKPGQAPVVVVYDDSDRPSGIPERFSGSNSGNTATLTISRVEAGDEADYYCQVWDRSSEAVIFGGGTKVTVL

SEQ ID NO: 4172 - protein, 11 aa, synthetic construct
  REGION 1..11: note = Synthetic
QVWDRSSEAVI

SEQ ID NO: 4173 - protein, 123 aa, synthetic construct; identical to SEQ ID NO: 109
  REGION 1..123: note = Synthetic

SEQ ID NO: 4174 - protein, 16 aa, synthetic construct
  REGION 1..16: note = Synthetic
ATSLRGSCINGVCWAY

SEQ ID NO: 4175 - protein, 110 aa, synthetic construct
  REGION 1..110: note = Synthetic
QFVLTQEPSLTVSPGGTVTLTCASSTGAVTSGYYPNWFQQKPGQAPRALIYSTNNKHSWTPARFSGSLLGGKAALTLSRVQPEDEAEYYCLLYYGGAHWVFGGGTKLTVL

SEQ ID NO: 4176 - protein, 10 aa, synthetic construct
  REGION 1..10: note = Synthetic
LLYYGGAHWV

SEQ ID NO: 4177 - protein, 120 aa, synthetic construct
  REGION 1..120: note = Synthetic
QVQLVESGGGVVQPGRSLRLSCAASGFTFSDYGMHWVRQAPGKGLEWVAVISYDGSAKYYADSVKGRFSISRDNSKNTVYLQMNSLRPGDTAVYFCARYSYADSDALDIWGRGTMVTVSS

SEQ ID NO: 4178 - protein, 13 aa, synthetic construct
  REGION 1..13: note = Synthetic
ARYSYADSDALDI

SEQ ID NO: 4179 - protein, 98 aa, synthetic construct
  REGION 1..98: note = Synthetic
QSALTQPASVSGSPGQSITISCTGASSDVGTYKYGSWYQKHPGKAPKLRTYDVSNRPSGVFNRFSGSKSGNTASLIISGLQAEDEGVVLRRRDQPGRP

SEQ ID NO: 4180 - skipped

SEQ ID NO: 4181 - protein, 127 aa, synthetic construct
  REGION 1..127: note = Synthetic
QVQLVESGGGVVQPGKSLRLSCAASGFTFSGSDMHWVRQAPGKGLEWVAVISSDGSNTYYRDSVKGRFTISRDNSKNTLYLQMISLRTEDTAVYYCAKDGASYDNTGHYSAEYFQHWGQGALVIVSS

SEQ ID NO: 4182 - protein, 20 aa, synthetic construct
  REGION 1..20: note = Synthetic
AKDGASYDNTGHYSAEYFQH

SEQ ID NO: 4183 - protein, 108 aa, synthetic construct
  REGION 1..108: note = Synthetic
SYVLTQPPSVSVSPGQTARITCSGDALPKQYACWYQQKPGQAPVVVIYKDTERPSGIPARFSGSSSGTTVTLTISGVQAEDEADYYCQSADSSGPYVIFGGGTKLTVL

SEQ ID NO: 4184 - protein, 11 aa, synthetic construct
  REGION 1..11: note = Synthetic
QSADSSGPYVI

SEQ ID NO: 4185 - protein, 120 aa, synthetic construct; identical to SEQ ID NO: 91
  REGION 1..120: note = Synthetic

SEQ ID NO: 4186 - protein, 13 aa, synthetic construct
  REGION 1..13: note = Synthetic
AASSPFSGGWFHP

SEQ ID NO: 4187 - protein, 108 aa, synthetic construct
  REGION 1..108: note = Synthetic
QFVLTQPASVSGSPGQSITISCTETSSDVGNYNLVSWYQQHPGKAPKLVIYEGTKRPSGVSNRFSASKSGNTASLTISELQAEDEANYYCCSYARSGVFGGGTKLTVL

SEQ ID NO: 4188 - protein, 8 aa, synthetic construct
  REGION 1..8: note = Synthetic
CSYARSGV

SEQ ID NO: 4189 - protein, 128 aa, synthetic construct; identical to SEQ ID NO: 93
  REGION 1..128: note = Synthetic

SEQ ID NO: 4190 - protein, 21 aa, synthetic construct
  REGION 1..21: note = Synthetic
AGLNSGDYYDDPGYSKGGMDV

SEQ ID NO: 4191 - protein, 109 aa, synthetic construct
  REGION 1..109: note = Synthetic
SYVLTQPPSVSVSPGQTARITCSGDALPKRYAYWYQQKSGQAPVLVIYEDSKRPSGIPERFSGSSSGTMATLTISGAQVEDEADYHCYSTDTSDNHRGVFGGGTKLTVL

SEQ ID NO: 4192 - protein, 12 aa, synthetic construct
  REGION 1..12: note = Synthetic
YSTDTSDNHRGV

SEQ ID NO: 4193 - protein, 120 aa, synthetic construct
  REGION 1..120: note = Synthetic
QLQLQESGPGLVKPSETLSLTCTVSGGSTSSRTYYWGWIRQPPGKGLEWIGTIYYSGNTYYNPSLKSRVTISVDTSKNQFSLKLSSVTAADTAVYYCARQVTVTPDFDLWGRGTLVTVSS

SEQ ID NO: 4194 - protein, 12 aa, synthetic construct
  REGION 1..12: note = Synthetic
ARQVTVTPDFDL

SEQ ID NO: 4195 - protein, 109 aa, synthetic construct
  REGION 1..109: note = Synthetic
EIVLTQSPATLSLSPGERATLSCRASQSVSSYLAWYQQKPGQAPRLLIYDASNRATGIPARFSGSGYGTDFTLTISSLEPEDFAVYYCQQRGKWPPQYTFGQGTKLEIK

SEQ ID NO: 4196 - protein, 11 aa, synthetic construct
  REGION 1..11: note = Synthetic
QQRGKWPPQYT

SEQ ID NO: 4197 - protein, 125 aa, synthetic construct
  REGION 1..125: note = Synthetic
QVQLQESGPGLVKPSQTLSLTCTVSGGSISSGGYCWSWIRQHPGKGLEWIGYIYDSGNTYYNPSLKSRVTISGDTSKNQFSLKLTSVTAADTAMYYCARERGGLGMVIPDAFDIWGQGTMVTVSS

SEQ ID NO: 4198 - protein, 17 aa, synthetic construct
  REGION 1..17: note = Synthetic
ARERGGLGMVIPDAFDI

SEQ ID NO: 4199 - protein, 112 aa, synthetic construct
  REGION 1..112: note = Synthetic
DIVMTQSPDSLAVSLGERATINCKSSQSVLYSSNNKNYLAWYQQKPGQPPKLLIYWASTRESGVPDRFSGSGSGTDFTLTINSLQTEDVAVYYCQQYYSLRTFGQGTKVEIK

SEQ ID NO: 4200 - protein, 8 aa, synthetic construct
  REGION 1..8: note = Synthetic
QQYYSLRT

SEQ ID NO: 4201 - protein, 120 aa, synthetic construct
  REGION 1..120: note = Synthetic
EVQLVESGGGLVQPGRSLRLSCAASGFTFDDYAMHWVRQAPGKGLEWVSGISWNSGNIGYADSVKGRFTISRDNAKNSLYLQMNSLRAEDTAFYYCAKDIGYSSGLFDYWGQGTLVTVSS

SEQ ID NO: 4202 - protein, 13 aa, synthetic construct
  REGION 1..13: note = Synthetic
AKDIGYSSGLFDY

SEQ ID NO: 4203 - protein, 107 aa, synthetic construct
  REGION 1..107: note = Synthetic
EIVLTQSPGTLSLSPGERATLSCRASQSVSRDLAWYQQKPGQAPRLLIYGASNRATGIPDRFSGSGSGTDFTLTISRLEPEDFAVYYCQQYGSSPFTFGPGTKVDIK

SEQ ID NO: 4204 - protein, 9 aa, synthetic construct
  REGION 1..9: note = Synthetic
QQYGSSPFT

SEQ ID NO: 4205 - protein, 124 aa, synthetic construct
  REGION 1..124: note = Synthetic
QVQLQQWGAGLLKPSETLSLSCAVSGGSFSGYYWSWIRQPPGKGLEWIGEISHSGNFNYNPSFKSRVTLSVDTSKNQFSLNLRSVTAADTAMYYCARGFQPLDKLPTWDYFDYWGQGTQVTVSS

SEQ ID NO: 4206 - protein, 18 aa, synthetic construct
  REGION 1..18: note = Synthetic
ARGFQPLDKLPTWDYFDY

SEQ ID NO: 4207 - protein, 107 aa, synthetic construct
  REGION 1..107: note = Synthetic
EIVMTQSPXTLSVSLGERATLSCRASQSVSSNLAWYQQKPGQAPRLLIFGASTRATGIPARFSGSGSGTEFTLTISSLQSEDLAVFYCQQYNNWPRTFGQGTKVEIK

SEQ ID NO: 4208 - protein, 9 aa, synthetic construct
  REGION 1..9: note = Synthetic
QQYNNWPRT

SEQ ID NO: 4209 - protein, 128 aa, synthetic construct; identical to SEQ ID NO: 99
  REGION 1..128: note = Synthetic

SEQ ID NO: 4210 - protein, 21 aa, synthetic construct
  REGION 1..21: note = Synthetic
ATAFAILGTNEKSHYYYGVDV

SEQ ID NO: 4211 - protein, 112 aa, synthetic construct; identical to SEQ ID NO: 100
  REGION 1..112: note = Synthetic

SEQ ID NO: 4212 - protein, 9 aa, synthetic construct
  REGION 1..9: note = Synthetic
MQVTQFPYT

SEQ ID NO: 4213 - protein, 127 aa, synthetic construct
  REGION 1..127: note = Synthetic
QVQLVQSGAEVKKPGPSVKVSCKASGGTFSSSAISWIRQAPGQGLEWMGRIIPMLNKANYAQKFQGRVTISADESTGTAYMELRSLRSEDTAVYYCARDRGVYDRGNYFYYYGMDVWGQGTSVTVSS

SEQ ID NO: 4214 - protein, 20 aa, synthetic construct
  REGION 1..20: note = Synthetic
ARDRGVYDRGNYFYYYGMDV

SEQ ID NO: 4215 - protein, 112 aa, synthetic construct; identical to SEQ ID NO: 96
  REGION 1..112: note = Synthetic

SEQ ID NO: 4216 - protein, 9 aa, synthetic construct
  REGION 1..9: note = Synthetic
MQALQSPHT

SEQ ID NO: 4217 - protein, 119 aa, synthetic construct
  REGION 1..119: note = Synthetic
QVQLQQWGAGLLKPSETLSLTCAVYGGSFSGFFWSWIRQSPGKGLEWIGEITHSGDTNYNPSLKSRVIISVDRSNNQFSLKLSSVTAADTAVYYCARGIWIGGAQFDYWGQGTPVTVSS

SEQ ID NO: 4218 - protein, 13 aa, synthetic construct
  REGION 1..13: note = Synthetic
ARGIWIGGAQFDY

SEQ ID NO: 4219 - protein, 107 aa, synthetic construct
  REGION 1..107: note = Synthetic
DIQMTQSPSSLSASLGDRVTITCRASQSISRYLNWYQQKPGKAPKLLISAASSLQTXVPSSFSGSGSGTDFTLTISSLQPEDFATYYCQQSYSTPYTFGQGTKLEIK

SEQ ID NO: 4220 - protein, 9 aa, synthetic construct
  REGION 1..9: note = Synthetic
QQSYSTPYT

SEQ ID NO: 4221 - protein, 117 aa, synthetic construct
  REGION 1..117: note = Synthetic
QVQLQESGPGLVKPSETLSLTCTVSGGSISPYYWTWIRQPPGKGLEWIGFVYSSGTTNYNPSLKSRVAMSVDTSKSQFSLNLTSVTAADTAVYYCARGPYSSGHPIWGQGTLVTVSS

SEQ ID NO: 4222 - protein, 11 aa, synthetic construct
  REGION 1..11: note = Synthetic
ARGPYSSGHPI

SEQ ID NO: 4223 - protein, 109 aa, synthetic construct
  REGION 1..109: note = Synthetic
EIVMTQSPATLSVSPGERATLSCRASQSISTNLAWYQQKPGQAPRLLIYGASTRATGLPARFSGSGSGTEFTLTISSLQSEDFAIYYCQQYNNWPPMWTFGQGTKVEIK

SEQ ID NO: 4224 - protein, 11 aa, synthetic construct
  REGION 1..11: note = Synthetic
QQYNNWPPMWT

SEQ ID NO: 4225 - protein, 122 aa, synthetic construct
  REGION 1..122: note = Synthetic
QVQLVESGGGVVQPGRSLRLSCAASGFTFSNHGMHWVRQAPGKGLEWVAIISFDGSNEYYADSMKGRFTISRDNSKNTLYLQMNSLRAEDTAVYYCAKDFFNGYSSSWGFDYWGQGTLVTVS

SEQ ID NO: 4226 - protein, 16 aa, synthetic construct
  REGION 1..16: note = Synthetic
AKDFFNGYSSSWGFDY

SEQ ID NO: 4227 - protein, 107 aa, synthetic construct
  REGION 1..107: note = Synthetic
DIQMTQSPSSLSASVGDRVTITCRASQGISNSLAWFQQKPGKAPKSLIYVASNLQSGVPSRFSGSGSGTDFTLTISSLQPEDFATYYCQQYNTYPITFGQGTRXENK

SEQ ID NO: 4228 - protein, 9 aa, synthetic construct
  REGION 1..9: note = Synthetic
QQYNTYPIT

SEQ ID NO: 4229 - protein, 121 aa, synthetic construct
  REGION 1..121: note = Synthetic
EVQLLESGGGLVQPGGSLRLSCAASGFTFSSYAMVWVRQAPGKGLEWVSDISGSGGSTYYADSVKGRFTISRDNSLNTLYLQMKSLRAEDTAVYYCAKNRWTLTRGFFDYWGQGTLVTVSS

SEQ ID NO: 4230 - protein, 14 aa, synthetic construct
  REGION 1..14: note = Synthetic
AKNRWTLTRGFFDY

SEQ ID NO: 4231 - protein, 106 aa, synthetic construct
  REGION 1..106: note = Synthetic
DIQMTQSPSSLSASVGDRVTITCRASQGISNYLAWYQQKPGKVPKLLIYAASTLQSGVPSRFSGSGSGTDFTLTISSLQPEDVATYYCQKYNSALTFGGGTKVEIK

SEQ ID NO: 4232 - protein, 8 aa, synthetic construct
  REGION 1..8: note = Synthetic
QKYNSALT

SEQ ID NO: 4233 - protein, 123 aa, synthetic construct; identical to SEQ ID NO: 101
  REGION 1..123: note = Synthetic

SEQ ID NO: 4234 - protein, 16 aa, synthetic construct
  REGION 1..16: note = Synthetic
AAVPALWRGHYSLPTH

SEQ ID NO: 4235 - protein, 108 aa, synthetic construct
  REGION 1..108: note = Synthetic
EIVLTQSPGTLSLSPGERXTLSCRTSQSVSSSYLAWYQQKPGQAPRLLIYGASSRATGIPDRFSGSGSGTDFTLTISRLEPEDFAMYYCLQYGRSLYTFGQGTKLEIK

SEQ ID NO: 4236 - protein, 9 aa, synthetic construct
  REGION 1..9: note = Synthetic
LQYGRSLYT

SEQ ID NO: 4237 - protein, 123 aa, synthetic construct
  REGION 1..123: note = Synthetic
QVQLQESGPGLVKPSQTLSLTCTVSGDSITSGAYYWSWIRQHPGKGLEWIGNIFYSGITYYNPSLKSRIIMSVDTSTNQFSLKLTSVTAADTAIYYCARVPTTYDDYGGLDYWGQGILVTVSS

SEQ ID NO: 4238 - protein, 15 aa, synthetic construct
  REGION 1..15: note = Synthetic
ARVPTTYDDYGGLDY

SEQ ID NO: 4239 - protein, 107 aa, synthetic construct
  REGION 1..107: note = Synthetic
DIQMTQSPSSLSASVGDRVTITCRASQDIRNDLDWYQQKPGKAPKRLIYTASNLQSGVPSRFSGSESGTEFTLTISSLQPEDFATYYCLQHNSYPLTFGGGTKVDIK

SEQ ID NO: 4240 - protein, 9 aa, synthetic construct
  REGION 1..9: note = Synthetic
LQHNSYPLT

SEQ ID NO: 4241 - protein, 120 aa, synthetic construct
  REGION 1..120: note = Synthetic
QVQLQESGPGLVKPSETLSLTCTVSGGSISSYYWTWIRQPPGKGLEWIGYIYYSGSTNYNPSLRSRVTMSVDTSKNQFSLKLSSVTGADTAVYYCVREGGDAYNFPLDYWGQGTLVTVSS

SEQ ID NO: 4242 - protein, 14 aa, synthetic construct
  REGION 1..14: note = Synthetic
VREGGDAYNFPLDY

SEQ ID NO: 4243 - protein, 113 aa, synthetic construct
  REGION 1..113: note = Synthetic
DIVMTQSPDSLAVSLGERATINCKSSQSVLFSSNNKNYLAWYQQKPGQPPKLLIYWASTRESGVPDRFSGSGSGTDFTLTISSLQAEDVAVYYCQQYYNAPRTFGQGTKVEIK

SEQ ID NO: 4244 - protein, 9 aa, synthetic construct
  REGION 1..9: note = Synthetic
QQYYNAPRT

SEQ ID NO: 4245 - protein, 118 aa, synthetic construct
  REGION 1..118: note = Synthetic
QVQLVQSGAEVKKPGSSVKVSCKTSGGPFSSYGFSWVRQAPGQGLEWMGGIVPIFGTANYAQNFQGRVTITADESTSTAYMELSSLRSEDTAFYYCARGLQWLAPDSWGQGTLVTVSS

SEQ ID NO: 4246 - protein, 11 aa, synthetic construct
  REGION 1..11: note = Synthetic
ARGLQWLAPDS

SEQ ID NO: 4247 - protein, 113 aa, synthetic construct
  REGION 1..113: note = Synthetic
DIVMTQSPDSLAVSLGERATLHCKSSQSVLYSSNNKNYLAWYQQKPGQPPKLLIYWTSIRESGVPDRFSGSGSGTDFTLTISSLQAEDVAVYYCQQYYSPPFTFGPGTKVDIK

SEQ ID NO: 4248 - protein, 9 aa, synthetic construct
  REGION 1..9: note = Synthetic
QQYYSPPFT

SEQ ID NO: 4249 - protein, 127 aa, synthetic construct; identical to SEQ ID NO: 97
  REGION 1..127: note = Synthetic

SEQ ID NO: 4250 - protein, 20 aa, synthetic construct
  REGION 1..20: note = Synthetic
ATDSNMIVVRGNYYYSGLDV

SEQ ID NO: 4251 - protein, 107 aa, synthetic construct; identical to SEQ ID NO: 98
  REGION 1..107: note = Synthetic

SEQ ID NO: 4252 - protein, 9 aa, synthetic construct
  REGION 1..9: note = Synthetic
HQYNNWPWT

SEQ ID NO: 4253 - protein, 123 aa, synthetic construct
  REGION 1..123: note = Synthetic
QLQLQESGPRLVKPSETLSLTCTVSGGSISSHYYYWGWIRQPPGKGLGWIGSIYYSGSTFYNPSLKSRVTISVDTSKNQFSLKLTSVTAADTAVYYCARFKSGYAWDEGFDIWGQGTLVTVSS

SEQ ID NO: 4254 - protein, 15 aa, synthetic construct
  REGION 1..15: note = Synthetic
ARFKSGYAWDEGFDI

SEQ ID NO: 4255 - protein, 107 aa, synthetic construct
  REGION 1..107: note = Synthetic
DIQMTQSPSSLSASVGDRVTITCRASQGIRNDLGWYQQKPGKAPKRLIYGASSLQSGVPSRFSGSGSGTEFTLTISSLQPEDFASYYCLQYNSYPLTFGGGTKVEIK

SEQ ID NO: 4256 - protein, 9 aa, synthetic construct
  REGION 1..9: note = Synthetic
LQYNSYPLT

SEQ ID NO: 4257 - protein, 121 aa, synthetic construct
  REGION 1..121: note = Synthetic
EVQLLESGGGLVQPGGSLRLSCAASGFTFTTSAMSWVRQAPGKGLEWVSSISGSGGSTFYADSVKGRFTISRDNSQNTLFLEVNSLRAEDTAVYYCAKDRYTYTRAWFDPWGQGTLVTVSS

SEQ ID NO: 4258 - protein, 14 aa, synthetic construct
  REGION 1..14: note = Synthetic
AKDRYTYTRAWFDP

SEQ ID NO: 4259 - protein, 107 aa, synthetic construct
  REGION 1..107: note = Synthetic
EIVMTQSPATLSVSPGERATLSCRASQSVSSNLAWYQQKPGQAPRLLIYDASTRATGIPARFSGSGSGTEFTLTISSLQSEDFALYYCQHYNNWLLTFGGGTKVEIK

SEQ ID NO: 4260 - protein, 9 aa, synthetic construct
  REGION 1..9: note = Synthetic
QHYNNWLLT

SEQ ID NO: 4261 - protein, 120 aa, synthetic construct
  REGION 1..120: note = Synthetic
EVQLVESGGGLVKPGGSLRLSCAASGFTFSTYTMNWVRQAPGKGLEWVSSISSSGSYIYYADSMKGRFTMSRDNAKDSLYLQMNSLRAEDTAVYYCARDAGGYSYGGDYWGQGTLVTVSS

SEQ ID NO: 4262 - protein, 13 aa, synthetic construct
  REGION 1..13: note = Synthetic
ARDAGGYSYGGDY

SEQ ID NO: 4263 - protein, 108 aa, synthetic construct
  REGION 1..108: note = Synthetic
DIQMTQSPSSLSASVGDRVTITCRASQAIRNDIGWYQQKPGKAPKRLIYAASSLQSGVPSRFSGSGSGTEFTLTISSLQPEDFATYYCLQYNNYPRLTFGGGTKVEIK

SEQ ID NO: 4264 - protein, 10 aa, synthetic construct
  REGION 1..10: note = Synthetic
LQYNNYPRLT

SEQ ID NO: 4265 - protein, 123 aa, synthetic construct; identical to SEQ ID NO: 107
  REGION 1..123: note = Synthetic

SEQ ID NO: 4266 - protein, 16 aa, synthetic construct
  REGION 1..16: note = Synthetic
ARDSQMASRWPYGFDI

SEQ ID NO: 4267 - protein, 105 aa, synthetic construct; identical to SEQ ID NO: 108
  REGION 1..105: note = Synthetic

SEQ ID NO: 4268 - protein, 6 aa, synthetic construct
  REGION 1..6: note = Synthetic
QQYGSS

SEQ ID NO: 4269 - protein, 129 aa, synthetic construct
  REGION 1..129: note = Synthetic
EVQLVESGGGLVKPGGSLRLSCAASGFTFSNYNMDWVRQAPGKGLEWVSSISSTSSYIYYADSVKGRFTVSRDNAKNSLYLQMNSLRAEDTAVYYCARDLLGDKPNLFRNYYYYGMDVWGQGTTVTVSS

SEQ ID NO: 4270 - protein, 22 aa, synthetic construct
  REGION 1..22: note = Synthetic
ARDLLGDKPNLFRNYYYYGMDV

SEQ ID NO: 4271 - protein, 107 aa, synthetic construct
  REGION 1..107: note = Synthetic
EIVMTQSPATLSVSPGERATLSCRASQSVGSNLAWYQHKPGQAPRLLIYGASTRATGIPARFSGSGSGTEFTLTISSLQSEDFAVYYCQQCYNWPPWTFGQGTKVEI

SEQ ID NO: 4272 - protein, 10 aa, synthetic construct
  REGION 1..10: note = Synthetic
QQCYNWPPWT

SEQ ID NO: 4273 - protein, 120 aa, synthetic construct
  REGION 1..120: note = Synthetic
EVQLLESGGALVQPGGSLRLSCAASGFPFSNYAMNWVRQAPGKGLEWVSSIISGGSTYYADSVKGRFTISRDNSKNTLYLQMSSLRAEDTAVYYCAKDLLVLRRYYFDYWGQGTLVTVSS

SEQ ID NO: 4274 - protein, 14 aa, synthetic construct
  REGION 1..14: note = Synthetic
AKDLLVLRRYYFDY

SEQ ID NO: 4275 - protein, 105 aa, synthetic construct
  REGION 1..105: note = Synthetic
EIVLTQSPATLSLSPGERATLSCRASQSVSSFLAWYQQKPGQAPRLLIYDAFNRATGIPARFSGSGSGTDFTLTISSLEPEDFAVYYCQQRSNSGFGQGTRLEIK

SEQ ID NO: 4276 - protein, 7 aa, synthetic construct
  REGION 1..7: note = Synthetic
QQRSNSG

SEQ ID NO: 4277 - protein, 131 aa, synthetic construct
  REGION 1..131: note = Synthetic
QVQLVESGGGVVQPGRSLRLSCAASGFTLSNYAIHWVRQAPGKGLEWVAVISYDGDNKFYADSVKGRFTISRDNSQSTLYLQMNSLRADDTAVYYCARELPERPIVVVPAAGLLMGWFDPWGQGTLVTVSS

SEQ ID NO: 4278 - protein, 24 aa, synthetic construct
  REGION 1..24: note = Synthetic
ARELPERPIVVVPAAGLLMGWFDP

SEQ ID NO: 4279 - protein, 113 aa, synthetic construct
  REGION 1..113: note = Synthetic
DIVMTQTPLSLPVTPGEPASISCRSSQSLLDSDDGDTYLDWYLQKPGQSPQLLIQTLSYRASGVPDRFSGSGSGTDFTLKISRVEAEDVGVYYCMQRIEFPYTFGQGTKLEIK

SEQ ID NO: 4280 - protein, 9 aa, synthetic construct
  REGION 1..9: note = Synthetic
MQRIEFPYT

SEQ ID NO: 4281 - protein, 122 aa, synthetic construct
  REGION 1..122: note = Synthetic
EVQLVQSGAEVKKPGESLKISCKGSGYSFANYWIAWVRQMPGKGLEWMGIIYPGDSDTRYSPSFQGQVTMSADKSIDTAYLQWSSLKASDTAMYYCARQAMATITGVGFDPWGQGTLVTVSS

SEQ ID NO: 4282 - protein, 15 aa, synthetic construct
  REGION 1..15: note = Synthetic
ARQAMATITGVGFDP

SEQ ID NO: 4283 - protein, 112 aa, synthetic construct
  REGION 1..112: note = Synthetic
DIVMTQSPLSLPVTPGEPASISCRSSQSLLHSNGYKYLDWYLQKPGQSPQLLIFLGSNRASGVPDRFSGSGSGTDFTLKISRVEAEDVGVYYCMQPLQTPYTFGQGTKLEIK

SEQ ID NO: 4284 - protein, 9 aa, synthetic construct
  REGION 1..9: note = Synthetic
MQPLQTPYT

SEQ ID NO: 4285 - protein, 125 aa, synthetic construct
  REGION 1..125: note = Synthetic
EVQLVESGGGLVKPGGSLRLSCAASGFTFSHSIMNWVRQAPGKGLEWVSSISSTSSFIYYVDSVKGRFTISRDNAKNSLYLQMNSLRPEDTAVYYCARTPNLRSDYWNEHYLDHWGQGTLVTVSS

SEQ ID NO: 4286 - protein, 18 aa, synthetic construct
  REGION 1..18: note = Synthetic
ARTPNLRSDYWNEHYLDH

SEQ ID NO: 4287 - protein, 108 aa, synthetic construct; identical to SEQ ID NO: 88
  REGION 1..108: note = Synthetic

SEQ ID NO: 4288 - protein, 10 aa, synthetic construct
  REGION 1..10: note = Synthetic
QQCYNWPPWT

SEQ ID NO: 4289 - protein, 121 aa, synthetic construct; identical to SEQ ID NO: 105
  REGION 1..121: note = Synthetic

SEQ ID NO: 4290 - protein, 14 aa, synthetic construct
  REGION 1..14: note = Synthetic
ARDEGGYNYGISDY

SEQ ID NO: 4291 - protein, 108 aa, synthetic construct; identical to SEQ ID NO: 106
  REGION 1..108: note = Synthetic

SEQ ID NO: 4292 - protein, 10 aa, synthetic construct
  REGION 1..10: note = Synthetic
LQYNSYPRST

SEQ ID NO: 4293 - protein, 124 aa, synthetic construct; identical to SEQ ID NO: 113
  REGION 1..124: note = Synthetic

SEQ ID NO: 4294 - protein, 17 aa, synthetic construct
  REGION 1..17: note = Synthetic
AIDRAGRQLERFAWFDP

SEQ ID NO: 4295 - protein, 110 aa, synthetic construct
  REGION 1..110: note = Synthetic
QFVLTQPASVSGSPGQSITISCSGTSSDIGSYNVVSWYQQHPDKAPKVVIYEGIKRPSGISSRFSASRSGSTASLTISGLQAEDEADYYCCSYVGSSTWVFGGGTKVTVL

SEQ ID NO: 4296 - protein, 10 aa, synthetic construct
  REGION 1..10: note = Synthetic
CSYVGSSTWV

SEQ ID NO: 4297 - protein, 124 aa, synthetic construct
  REGION 1..124: note = Synthetic
QVQLVQSGAEVKMPGASVKVSCRVSGFTLTEISIHWVRQAPGKGLEWMGGFDPEHAETIYAQKFQGRVTMTEDTSTDTAYMELSSLRSEDTAVYYCASTTALRPLIQANWFDPWGQGTLVTVSS

SEQ ID NO: 4298 - protein, 17 aa, synthetic construct
  REGION 1..17: note = Synthetic
ASTTALRPLIQANWFDP

SEQ ID NO: 4299 - protein, 111 aa, synthetic construct
  REGION 1..111: note = Synthetic
QFVLTQPPSVSAAPGQKVTISCSGNNSNIANNYVSWYQQLPGTAPKLLIYENNKRPSGIPDRFSGSKSGTSATLGITGLQTGDEADYYCGTWDSSLSGGVVFGGGTRVTVL

SEQ ID NO: 4300 - protein, 12 aa, synthetic construct
  REGION 1..12: note = Synthetic
GTWDSSLSGGVV

SEQ ID NO: 4301 - protein, 122 aa, synthetic construct
  REGION 1..122: note = Synthetic
QVQLQESGPGLLKPSQTLSLTCTVSGGSISSGGYYWSCIRQHPGKGLEWIGYIFYSGSTYYNPSLESRATISVDTSKNQFSLKLTSVTPADTAVYYCARVSTVTARWYFDLWGRGTLVTVSS

SEQ ID NO: 4302 - protein, 14 aa, synthetic construct
  REGION 1..14: note = Synthetic
ARVSTVTARWYFDL

SEQ ID NO: 4303 - protein, 108 aa, synthetic construct
  REGION 1..108: note = Synthetic
QFVLTQPRSVSGSPGQSVTLSCTGTSSDVGGYNYVSWYQQHPGKAPKVLIYDVNKRPSGVPDRFSGSKSGNTASLTISGLQAEDEAHYYCCSYAGSWVFGGGTKLTVL

SEQ ID NO: 4304 - protein, 8 aa, synthetic construct
  REGION 1..8: note = Synthetic
CSYAGSWV

SEQ ID NO: 4305 - protein, 124 aa, synthetic construct
  REGION 1..124: note = Synthetic
QVQLVESGGGVVQPGRSLRLSCAASGFTFNNFGMHWVRQAPGKGLEWVTFIWYDGSNTYYADSVKGRFTISRDNSKNTLYLQMNSLRAEDTAVYYCARDRTDSSSFLTGYFDYWGQGTLVAVSS

SEQ ID NO: 4306 - protein, 17 aa, synthetic construct
  REGION 1..17: note = Synthetic
ARDRTDSSSFLTGYFDY

SEQ ID NO: 4307 - protein, 108 aa, synthetic construct
  REGION 1..108: note = Synthetic
SYVLTQPPSVSVSPGQTARITCSGDALPKKYAYWYQQKSGQAPVLVIYEDSKRPSGIPERFAGSSSGTMGTLTISGAQVEDEADYYCYSTDSSGNLWVFGGGTKLTVL

SEQ ID NO: 4308 - protein, 11 aa, synthetic construct
  REGION 1..11: note = Synthetic
YSTDSSGNLWV

SEQ ID NO: 4309 - protein, 124 aa, synthetic construct
  REGION 1..124: note = Synthetic
EVQLVESGGGLVKPGGSLRLSCAASGFTFSSYSMNWVRQAPGKGLEWVSSISSGSNYIYYAGSVKGRFTISRDNAKNSLYLQMNSLRAEDTAVYYCARDPESEAYYFYYYMDVWGKGTTVTVSS

SEQ ID NO: 4310 - protein, 17 aa, synthetic construct
  REGION 1..17: note = Synthetic
ARDPESEAYYFYYYMDV

SEQ ID NO: 4311 - protein, 112 aa, synthetic construct
  REGION 1..112: note = Synthetic
QFVLTQPASVSGSPGQSITISCTGTSSDVGSYNLVSWYQQHPGKAPKLMIYDVSKRPSGVSNRFSGSKSGNTASLTISGLQAEDEADYYCCSYAGGSTPSYVFGTGTKVTVL

SEQ ID NO: 4312 - protein, 12 aa, synthetic construct
  REGION 1..12: note = Synthetic
CSYAGGSTPSYV

SEQ ID NO: 4313 - protein, 124 aa, synthetic construct; identical to SEQ ID NO: 115
  REGION 1..124: note = Synthetic

SEQ ID NO: 4314 - protein, 17 aa, synthetic construct
  REGION 1..17: note = Synthetic
ARDRTDSSSFLAGYFDY

SEQ ID NO: 4315 - protein, 108 aa, synthetic construct
  REGION 1..108: note = Synthetic
SYVLTQPPSVSVSPGQTARITCSGDALPKKYAYWYQQKSGQAPVLVIYEDSKRPSGIPETFSGSSSGTMATLTISGAQVEDEADYYCYSTHSSDDLWVFGGGTKLTVL

SEQ ID NO: 4316 - protein, 11 aa, synthetic construct
  REGION 1..11: note = Synthetic
YSTHSSDDLWV

SEQ ID NO: 4317 - protein, 122 aa, synthetic construct; identical to SEQ ID NO: 51
  REGION 1..122: note = Synthetic

SEQ ID NO: 4318 - protein, 15 aa, synthetic construct
  REGION 1..15: note = Synthetic
TTGPAYGSGWFPPWY

SEQ ID NO: 4319 - protein, 111 aa, synthetic construct; identical to SEQ ID NO: 3827
  REGION 1..111: note = Synthetic

SEQ ID NO: 4320 - protein, 12 aa, synthetic construct
  REGION 1..12: note = Synthetic
GTWDRSLGAGGV

SEQ ID NO: 4321 - protein, 115 aa, synthetic construct; identical to SEQ ID NO: 123
  REGION 1..115: note = Synthetic

SEQ ID NO: 4322 - protein, 8 aa, synthetic construct
  REGION 1..8: note = Synthetic
ARGWYYDY

SEQ ID NO: 4323 - protein, 110 aa, synthetic construct
  REGION 1..110: note = Synthetic
QFVLTQPASVSGSPGQSITISCTGTSSDVGSYNLVSWYQQHPGKAPKLMIYEGNKRPSGVSNRFSGSKSGNTASLTISGLQAEDEAEYFCYSYAGSSTWVFGGGTKLTVL

SEQ ID NO: 4324 - protein, 10 aa, synthetic construct
  REGION 1..10: note = Synthetic
YSYAGSSTWV

SEQ ID NO: 4325 - protein, 127 aa, synthetic construct
  REGION 1..127: note = Synthetic
EVQLVESGGGLVQPGGSLRLSCVASGFTFSIYEMNWVRQAPGKGLEWVSYITTSGSTRYNADSVKGRFTISRDNAKNSLYLQMNSLRAEDTAVYYCARPQYHYYDSSAYHSYGFDIWGQGTMVTVSS

SEQ ID NO: 4326 - protein, 20 aa, synthetic construct
  REGION 1..20: note = Synthetic
ARPQYHYYDSSAYHSYGFDI

SEQ ID NO: 4327 - protein, 111 aa, synthetic construct
  REGION 1..111: note = Synthetic
QSVLTQSPSASASLGASVNLTCTLSSGHKSYAIAWHQQQPEKGPRYLMSLNSDGSHSKGDGIPDRFSGSSSGAERFLTISSLQSEDEADYYCQTWDTGIRVFGGGTRLTVL

SEQ ID NO: 4328 - protein, 9 aa, synthetic construct
  REGION 1..9: note = Synthetic
QTWDTGIRV

SEQ ID NO: 4329 - protein, 125 aa, synthetic construct
  REGION 1..125: note = Synthetic
QVQLVESGGGVVQPGRSLRLSCAASGFTFRNYGMHWVRQAPGKGLEWVAFIWYDGSDKYYAGSVKGRFTISRDNSKNTLYLQMNSLRGEDTAVYYCARDYGFVVVITEYYGMDVWGQGTTVTVSS

SEQ ID NO: 4330 - protein, 18 aa, synthetic construct
  REGION 1..18: note = Synthetic
ARDYGFVVVITEYYGMDV

SEQ ID NO: 4331 - protein, 110 aa, synthetic construct
  REGION 1..110: note = Synthetic
QFVLTQPPSASGTPGQRVTISCSGGNSNIGSNYVYWYQQFPGTAPKLLIYRNNQRPSGVPDRFSGSKSGTSASLAISGLRSEDEADYYCAAWDDSLSGWVFGGGTKLTVL

SEQ ID NO: 4332 - protein, 11 aa, synthetic construct
  REGION 1..11: note = Synthetic
AAWDDSLSGWV

SEQ ID NO: 4333 - protein, 123 aa, synthetic construct
  REGION 1..123: note = Synthetic
QLQLQESGSGLVKPSQTLSLTCAVSGGSISSGGLSWSWIRQPPGKDLEWIGFIYHSGSTYYNPSLKSRVTMSVDRSKNQFSLRLNSVTAADTAVYYCAREAGSTGWSVWFDPWGQGTLVTVSS

SEQ ID NO: 4334 - protein, 15 aa, synthetic construct
  REGION 1..15: note = Synthetic
AREAGSTGWSVWFDP

SEQ ID NO: 4335 - protein, 113 aa, synthetic construct
  REGION 1..113: note = Synthetic
QFVLTQPPSVSAAPGQRVTISCTGSSSNIGAGNDVHWYQQFPGTAPKLLIYANTNRPSGVPDRFSGSKSGTSASLAITGLQSEDEADYYCQSYDSSLTGPSHVFGTGTKVTVL

SEQ ID NO: 4336 - protein, 13 aa, synthetic construct
  REGION 1..13: note = Synthetic
QSYDSSLTGPSHV

SEQ ID NO: 4337 - protein, 121 aa, synthetic construct; identical to SEQ ID NO: 3805
  REGION 1..121: note = Synthetic

SEQ ID NO: 4338 - protein, 17 aa, synthetic construct
  REGION 1..17: note = Synthetic
ARSDGEGPYPYYYGFDV

SEQ ID NO: 4339 - protein, 108 aa, synthetic construct
  REGION 1..108: note = Synthetic
SYVLTQPPSVSVSPGQTARITCSGDALPKEYAYWYQQKPGQAPVLVIYKDSERPVGIPERFSGSSSGTTVTLTISGVQAEDESDYYCQSADTSGTSVVFGGGTKLTVL

SEQ ID NO: 4340 - protein, 11 aa, synthetic construct
  REGION 1..11: note = Synthetic
QSADTSGTSVV

SEQ ID NO: 4341 - protein, 127 aa, synthetic construct; identical to SEQ ID NO: 3749
  REGION 1..127: note = Synthetic

SEQ ID NO: 4342 - protein, 20 aa, synthetic construct
  REGION 1..20: note = Synthetic
ARPQYHYYESGAYHWYGFDI

SEQ ID NO: 4343 - protein, 111 aa, synthetic construct; identical to SEQ ID NO: 3751
  REGION 1..111: note = Synthetic

SEQ ID NO: 4344 - protein, 9 aa, synthetic construct
  REGION 1..9: note = Synthetic
QTWDTGIRV

SEQ ID NO: 4345 - protein, 123 aa, synthetic construct
  REGION 1..123: note = Synthetic
QVQLQESGPGLVKPSGTLSLTCAVSGGSVGSSDWWSWVRQPPGKGLEWIGEIYHSGSTNYNPSLKSRVTMSVDKSKNQFSLKLSSVTAADTAIYYCARRFCNSSTCPNWYDPWGQGTLVTVSS

SEQ ID NO: 4346 - protein, 16 aa, synthetic construct
  REGION 1..16: note = Synthetic
ARRFCNSSTCPNWYDP

SEQ ID NO: 4347 - protein, 110 aa, synthetic construct
  REGION 1..110: note = Synthetic
QFVLTQPASVSGSPGQSITISCTGTSSDVGSYNLVSWYQQHPGKAPKLMIYLGSKRPSGVSSRFSGSKSGNTASLTISGLQAEDEADYHCCSYAGSTTWVFGGGTKLTVL

SEQ ID NO: 4348 - protein, 10 aa, synthetic construct
  REGION 1..10: note = Synthetic
CSYAGSTTWV

SEQ ID NO: 4349 - protein, 127 aa, synthetic construct; identical to SEQ ID NO: 157
  REGION 1..127: note = Synthetic

SEQ ID NO: 4350 - protein, 21 aa, synthetic construct
  REGION 1..21: note = Synthetic
ARGLEFWYYYDSSGPHRWFDP

SEQ ID NO: 4351 - protein, 115 aa, synthetic construct
  REGION 1..115: note = Synthetic
QSVLTQPSSLSASPGASASLTCTLRSGINVGSYMIYWYQQRPGSPPQYLLRYKSDSDKQQGSGVPSRFSGSKDASANAGILLISGLQSEDEADYYCMIWHSSASVFGGGTKLTVL

SEQ ID NO: 4352 - protein, 9 aa, synthetic construct
  REGION 1..9: note = Synthetic
MIWHSSASV

SEQ ID NO: 4353 - protein, 126 aa, synthetic construct
  REGION 1..126: note = Synthetic
QVQLVESGGGVVQPGRSLKLSCAASGFTFSSYGMHWVRQAPGKGLEWVTVIWNDESNKYYTDSVKGRFTVSRDNSKNTLFLQMDSLRVEDTAVYYCARSTIYDSGWDDYYFGMDVWGRGTTVTVSS

SEQ ID NO: 4354 - protein, 19 aa, synthetic construct
  REGION 1..19: note = Synthetic
ARSTIYDSGWDDYYFGMDV

SEQ ID NO: 4355 - protein, 108 aa, synthetic construct
  REGION 1..108: note = Synthetic
SYVLTQPPSVSVSPGQTARITCSGDALPKKFAYWYQQKSGQAPLLVIYDDSKRPSGIPARFSGSSSGTVATLTISGAQVEDEADYYCFSIDSTAIHRVFGGGTKVTVL

SEQ ID NO: 4356 - protein, 11 aa, synthetic construct
  REGION 1..11: note = Synthetic
FSIDSTAIHRV

SEQ ID NO: 4357 - protein, 124 aa, synthetic construct
  REGION 1..124: note = Synthetic
QVQLVQSGPEAKKPGSSVKVSCKASGGAFSNLGINWVRQAPGQGLEWMGRIIPLLGITNDAQKFRGRVAITADMSTSTAHMEVSGLRSEDTAVYYCATDRAGRQLERFAWFDPWGQGTLVTVSS

SEQ ID NO: 4358 - protein, 17 aa, synthetic construct
  REGION 1..17: note = Synthetic
ATDRAGRQLERFAWFDP

SEQ ID NO: 4359 - protein, 110 aa, synthetic construct
  REGION 1..110: note = Synthetic
QFVLTQPASVSGSPGQSITISCTGTSSDLGSYNVVSWYQHHPGKAPKPIIYEGTKRPSGVSNRFSGSKSGSTASLTISGLQAEDEADYYCCSYAGSNTWVFGGGTKVTVL

SEQ ID NO: 4360 - protein, 10 aa, synthetic construct
  REGION 1..10: note = Synthetic
CSYAGSNTWV

SEQ ID NO: 4361 - protein, 126 aa, synthetic construct
  REGION 1..126: note = Synthetic
EVQLVESGGGLVKPGGSLRLSCAASGFTFSSYSMNWVRQAPGKGLEWVSSISSSSSYIYYADSVKGRFTISRDNAKTSLYLQMNSLRAEDAAVYYCAREDEVGPGNYFFYYGMDVWGQGTTVTVSS

SEQ ID NO: 4362 - protein, 19 aa, synthetic construct
  REGION 1..19: note = Synthetic
AREDEVGPGNYFFYYGMDV

SEQ ID NO: 4363 - protein, 110 aa, synthetic construct
  REGION 1..110: note = Synthetic
QFVLTQPPSASGTPGQRVTISCSGSSSNIGNNYVYWYQQLPGTAPKLLIYRNNQRPSGVPDRFSGFKSGTSASLAISGLRSEDEADYYCAAWDDRLSGKVFGGGTKLTVL

SEQ ID NO: 4364 - protein, 11 aa, synthetic construct
  REGION 1..11: note = Synthetic
AAWDDRLSGKV

SEQ ID NO: 4365 - protein, 124 aa, synthetic construct
  REGION 1..124: note = Synthetic
QVQLVESGGGVVQPGRSLRLSCAASGFTFSNFGMHWVRQAPGKGLEWVAFIWYDGSNKFYADSVKGRFTISRDNSKSTLYLQMNSLRVEDTAVYYCARDRIDTSSFLAGYFDYWGQGTLVTVSS

SEQ ID NO: 4366 - protein, 17 aa, synthetic construct
  REGION 1..17: note = Synthetic
ARDRIDTSSFLAGYFDY

SEQ ID NO: 4367 - protein, 108 aa, synthetic construct
  REGION 1..108: note = Synthetic
SYVLTQPPSVSVSPGQTARITCSGDALPKKHAYWYQQKSGQAPVLVIYEDSKRPSGIPERFSGSSSGTMATLTISGAQVEDEADYYCYSTDSSGNLWVFGGGTKLTVL

SEQ ID NO: 4368 - protein, 11 aa, synthetic construct
  REGION 1..11: note = Synthetic
YSTDSSGNLWV

SEQ ID NO: 4369 - protein, 127 aa, synthetic construct
  REGION 1..127: note = Synthetic
EVQLVESGGGLVQPGGSLRLSCAASGFTFSIYEMNWVRQAPGKGLEWVSYITTSGTTRYNADSVKGRFTISRDNAKNLLYLQMNSLRAEDTAVYYCARPQYHYYESGAYHWYGFDVWGQGTMVTVSS

SEQ ID NO: 4370 - protein, 20 aa, synthetic construct
  REGION 1..20: note = Synthetic
ARPQYHYYESGAYHWYGFDV

SEQ ID NO: 4371 - protein, 111 aa, synthetic construct
  REGION 1..111: note = Synthetic
QSVLTQSPSASASLGASVKLTCSLSSGHSNYAIAWHQQQPERGPRFLMNLNSDGSHNKGDGIPDRFSGSSSGAERYLTISSLQSEDEADYYCQTWDTGIRVFGGGTKLTVL

SEQ ID NO: 4372 - protein, 9 aa, synthetic construct
  REGION 1..9: note = Synthetic
QTWDTGIRV

SEQ ID NO: 4373 - protein, 125 aa, synthetic construct; identical to SEQ ID NO: 119
  REGION 1..125: note = Synthetic

SEQ ID NO: 4374 - protein, 18 aa, synthetic construct
  REGION 1..18: note = Synthetic
ARDFGFVVVVPDYDGLDV

SEQ ID NO: 4375 - protein, 110 aa, synthetic construct; identical to SEQ ID NO: 3883
  REGION 1..110: note = Synthetic

SEQ ID NO: 4376 - protein, 11 aa, synthetic construct
  REGION 1..11: note = Synthetic
AAWDDSLSGWV

SEQ ID NO: 4377 - protein, 120 aa, synthetic construct
  REGION 1..120: note = Synthetic
QVQLQESGPGLVKPSGTLSLTCAVSGGSISTTKWWSWVRQPPLKGLEWIGEIYHTGNTNYNPSLRSRVTISVDKSKNHLSLKLTSVTDADTAVYYCARGGVYSSGAFDIWGQGTMVTVSS

SEQ ID NO: 4378 - protein, 13 aa, synthetic construct
  REGION 1..13: note = Synthetic
ARGGVYSSGAFDI

SEQ ID NO: 4379 - protein, 110 aa, synthetic construct
  REGION 1..110: note = Synthetic
QFVLTQPASVSGSPGQSITISCTGTSSDVGSYNLVSWYQQHPGNAPKLMIYEGTKRPSGVSNRFSASKSGNTASLTISGLQAEDEADYYCCSYAGFSTYVFGTGTSVTVL

SEQ ID NO: 4380 - protein, 10 aa, synthetic construct
  REGION 1..10: note = Synthetic
CSYAGFSTYV

SEQ ID NO: 4381 - protein, 123 aa, synthetic construct
  REGION 1..123: note = Synthetic
QLQLQESGSGLVKSSQTLSLTCAVSGGSISSGDHSWSWIRQPPGKGLEWIGFIYHSGSTYYNPSLKSRVTISVDRSKNQFSLKLSSVTAADTAIYYCAREAGSSGWSVWFDPWGQGTLVTVSS

SEQ ID NO: 4382 - protein, 15 aa, synthetic construct
  REGION 1..15: note = Synthetic
AREAGSSGWSVWFDP

SEQ ID NO: 4383 - protein, 113 aa, synthetic construct
  REGION 1..113: note = Synthetic
QSVLTQPPSVSGAPGQRVTISCTGSSSNIGAGHDVHWYRQLPGTAPKLLIYVNNNRPSGVPDRFSGSKSGTSASLAITGLQADDEADYYCQSYDSRLGGPSYVFGSGTKVTVL

SEQ ID NO: 4384 - protein, 13 aa, synthetic construct
  REGION 1..13: note = Synthetic
QSYDSRLGGPSYV

SEQ ID NO: 4385 - protein, 128 aa, synthetic construct
  REGION 1..128: note = Synthetic
QVQLVQSGAEVKKPGASVKVSCEVSGYTLTELSIHWVRQAPGKGLEWMGGFDPELGETIYAQKFQGRVTMTEDTSTDTAYMELSSLRSEDTAVYYCAAAPAVFGVVTSYYYYYGMNVWGQGTTVTVSS

SEQ ID NO: 4386 - protein, 21 aa, synthetic construct
  REGION 1..21: note = Synthetic
AAAPAVFGVVTSYYYYYGMNV

SEQ ID NO: 4387 - protein, 113 aa, synthetic construct
  REGION 1..113: note = Synthetic
QFVLTQPPSVSAAPGQRVTISCSGSSSNIGKNNVSWYYQLRGTAPKLLIYENNKRPSGIPDRFSGSKSGTSATLGITGLQTGDEANYYCGTWHSSLSARGNWVFGGGTTLTVL

SEQ ID NO: 4388 - protein, 14 aa, synthetic construct
  REGION 1..14: note = Synthetic
GTWHSSLSARGNWV

SEQ ID NO: 4389 - protein, 121 aa, synthetic construct
  REGION 1..121: note = Synthetic
QVQLQESGSGLVKPSGTLSLTCTVSGDSISSSHWWSWVRQPPGKGLEWIGEIYHSGGTNYNPILKSRLTISVDKSKNQFSLKVSSVTAADTAIYYCARENRQHLLGTIDYWGQGTLVTVSS

SEQ ID NO: 4390 - protein, 14 aa, synthetic construct
  REGION 1..14: note = Synthetic
ARENRQHLLGTIDY

SEQ ID NO: 4391 - protein, 110 aa, synthetic construct
  REGION 1..110: note = Synthetic
QSVLTQPASVSGSPGQSITISCTGASSDVGSYNLVSWYQQHPGKAPKLMIYQANKRPSGVSNRFSGSKSGNTASLTISGLRAEDEADYYCFSYGGFSTWVFGGGTRLTVL

SEQ ID NO: 4392 - protein, 10 aa, synthetic construct
  REGION 1..10: note = Synthetic
FSYGGFSTWV

SEQ ID NO: 4393 - protein, 119 aa, synthetic construct
  REGION 1..119: note = Synthetic
QVQLQQWGAGLLKPSETLSLTCSVYGGSFSDYYWNWIRQPPGKGLEWLGEINHSGSTNYNPSLKSRVSMSVDTSKNQFSLKVNSVTAADTAVYYCARGWSSYFYGMDVWGQGTTVTVSS

SEQ ID NO: 4394 - protein, 13 aa, synthetic construct
  REGION 1..13: note = Synthetic
ARGWSSYFYGMDV

SEQ ID NO: 4395 - protein, 110 aa, synthetic construct
  REGION 1..110: note = Synthetic
QFVLTQPASVSGSPGQSITISCTGTSSDVGSYNLVSWYQQYPSKAPKLVIYEGSKRPSGVSNRFSGSKSGNTASLTISGLQAEDEADYYCYSYAGSSTWVFGGGTKVTVL

SEQ ID NO: 4396 - protein, 10 aa, synthetic construct
  REGION 1..10: note = Synthetic
YSYAGSSTWV

SEQ ID NO: 4397 - protein, 127 aa, synthetic construct
  REGION 1..127: note = Synthetic
EVQLVESGGGLVQPGGSLRLSCAASGFTFSIYEMNWVRQAPGKGLEWVSYITTSGSARYNADSVKGRFTISRDNAKNSLYLQMNSLRAEDTAVYYCARPQYHYYDSSAYHSYGFDIWGQGTMVTVSS

SEQ ID NO: 4398 - protein, 20 aa, synthetic construct
  REGION 1..20: note = Synthetic
ARPQYHYYDSSAYHSYGFDI

SEQ ID NO: 4399 - protein, 111 aa, synthetic construct
  REGION 1..111: note = Synthetic
QFVLTQSPSASASLGASVKLTCTLSSGHSSYAIAWHQQQPEKGPRYLMKLNSDGSHSKGDGIPDRFSGSSSGAERYLTISSLQSEDEADYYCQTWDTGIRVFGGGTKLTVL

SEQ ID NO: 4400 - protein, 9 aa, synthetic construct
  REGION 1..9: note = Synthetic
QTWDTGIRV

SEQ ID NO: 4401 - protein, 124 aa, synthetic construct
  REGION 1..124: note = Synthetic
QVQLVQSGPEAKKPGSSVKVSCKASGGAFSNLGINWVRQAPGQGLEWMGRIIPVLGITNYAQKFRGRVAITADMSTSTAHMEVSGLRSEDTAVYYCATDRAGRQLERFAWFDPWGQGTLVTVSS

SEQ ID NO: 4402 - protein, 17 aa, synthetic construct
  REGION 1..17: note = Synthetic
ATDRAGRQLERFAWFDP

SEQ ID NO: 4403 - protein, 110 aa, synthetic construct
  REGION 1..110: note = Synthetic
QFVLTQPASVSGSPGQSITISCTGTSSDLGSYNLVSWYQHHPGKAPKPIIYEGTKRPSGVSNRISGSKSGSTASLTISGLQAEDEADYYCCSYAGSNTWVFGGGTKVTVL

SEQ ID NO: 4404 - protein, 10 aa, synthetic construct
  REGION 1..10: note = Synthetic
CSYAGSNTWV

SEQ ID NO: 4405 - protein, 121 aa, synthetic construct
  REGION 1..121: note = Synthetic
QVQLVESGGGVVQPGRSLRLSCAASGFTFSSYGMHWVRQAPGKGLEWVAVILYDGSNKYYADSVKGRFTISRDNSKNTLYLQMNSLRAEDTAVYYCAKAGLYGDYVRFGYWGQGTLVTVSS

SEQ ID NO: 4406 - protein, 14 aa, synthetic construct
  REGION 1..14: note = Synthetic
AKAGLYGDYVRFGY

SEQ ID NO: 4407 - protein, 110 aa, synthetic construct
  REGION 1..110: note = Synthetic
QFVLTQPASVSGSPGQSITISCTGTSSDVGNYNLVSWYQQHPGKAPKLLIYEVSKRPSGVSNRFSGSKSGKTASLTISGLQAEDEADYYCCSYAGSSTWVFGGGTKLTVL

SEQ ID NO: 4408 - protein, 10 aa, synthetic construct
  REGION 1..10: note = Synthetic
CSYAGSSTWV

SEQ ID NO: 4409 - protein, 122 aa, synthetic construct
  REGION 1..122: note = Synthetic
QVQLQESGPGLVKPSGTLSLTCAVSGGSLSSTNWWTWVRQPPGKGLEWIGEIYHSGSTNCNPSLKSRVTMSLDKSKNQFSLKLTSVTAADTAVYYCAARYCSGGHCGWFDPWGQGTLVTVSS

SEQ ID NO: 4410 - protein, 15 aa, synthetic construct
  REGION 1..15: note = Synthetic
AARYCSGGHCGWFDP

SEQ ID NO: 4411 - protein, 110 aa, synthetic construct
  REGION 1..110: note = Synthetic
QFVLTQPASVSGSPGQSITVSCTGTSSDVGSYNLVSWYQQHPGKAPKLMIYEAIKRPSGASHRFSGSKSGNTASLTISGLQAEDEADYYCCSYAGSSTWVFGGGTKLTVL

SEQ ID NO: 4412 - protein, 10 aa, synthetic construct
  REGION 1..10: note = Synthetic
CSYAGSSTWV

SEQ ID NO: 4413 - protein, 119 aa, synthetic construct
  REGION 1..119: note = Synthetic
QVQLQESGPGLVEPSGTLSLSCAVSGASVSTSDWWTWVRQPPGKGLEWIGEIYHTGNTNYNPSLQSRVTMSVDKSTNRFSLNLSSVTAADTAVYYCASRVSPGNWFDPWGQGTLVTVSS

SEQ ID NO: 4414 - protein, 12 aa, synthetic construct
  REGION 1..12: note = Synthetic
ASRVSPGNWFDP

SEQ ID NO: 4415 - protein, 110 aa, synthetic construct
  REGION 1..110: note = Synthetic
QFVLTQPASVSGSPGQSITISCTGTSSDVGSYNLVSWYQQHPGKAPKLIIYLGSKRPSGVSNRFSGSKSGNTASLTISGLQAEDEADYYCCSYAGFSTWIFGGGTKLTVL

SEQ ID NO: 4416 - protein, 10 aa, synthetic construct
  REGION 1..10: note = Synthetic
CSYAGFSTWI

SEQ ID NO: 4417 - protein, 114 aa, synthetic construct
  REGION 1..114: note = Synthetic
QVQLVQSGAEVKKSGASVKVSCKASGYTFIKLSTHWVRQAPGKGLEWMGSFDPEVGETIYAQTFQGRVTMTGDTSTDTAYMELSRLTSEDTAVYYCATGTMDVWGQGTTVTVSS

SEQ ID NO: 4418 - protein, 7 aa, synthetic construct
  REGION 1..7: note = Synthetic
ATGTMDV

SEQ ID NO: 4419 - protein, 108 aa, synthetic construct
  REGION 1..108: note = Synthetic
SYVLTQPPSVSVSPGQTARITCSGDALPKQYAYWYQQKAGQAPVMMIYKDSERPSGIPERFSGSSSGTTVTLTISGVQAEDEADYYCQSADSSGTYRVFGGGTKLTVL

SEQ ID NO: 4420 - protein, 11 aa, synthetic construct
  REGION 1..11: note = Synthetic
QSADSSGTYRV

SEQ ID NO: 4421 - protein, 124 aa, synthetic construct
  REGION 1..124: note = Synthetic
QVQLVESGGGVVQPGRSLRLSCAASGFSFMTYGMHWVRQAPGKGLEWVAFISYDGSKKYYADSVKGRFTISRDNSKNTLNLQMNSLRAEDTAVYYCAGGVPEGYYYYYYGLDVWGQGTTVTVSS

SEQ ID NO: 4422 - protein, 17 aa, synthetic construct
  REGION 1..17: note = Synthetic
AGGVPEGYYYYYYGLDV

SEQ ID NO: 4423 - protein, 108 aa, synthetic construct
  REGION 1..108: note = Synthetic
SYVLTQPPSVSVSPGQTARITCSGDGLPKQYAYWYQHKPGQAPVMIIYKDTERPSGIPERISGSSSGTTVTLTISGVQAEDEADYYCQSTDSGETLGVFGGGTKLTVL

SEQ ID NO: 4424 - protein, 11 aa, synthetic construct
  REGION 1..11: note = Synthetic
QSTDSGETLGV

SEQ ID NO: 4425 - protein, 127 aa, synthetic construct; identical to SEQ ID NO: 111
  REGION 1..127: note = Synthetic

SEQ ID NO: 4426 - protein, 20 aa, synthetic construct
  REGION 1..20: note = Synthetic
ARPQYHYYDTSAYHSYGFDI

SEQ ID NO: 4427 - protein, 111 aa, synthetic construct
  REGION 1..111: note = Synthetic
QFVLTQSPSASASLGASVKLTCTLSSGHSSYAIAWHQQQPEKGPRYLMTLNSDGSHSKGDGIPDRFSGSSSGAERYLTISSLQSDDEADYYCQTWDTGIRVFGGGTKLTVL

SEQ ID NO: 4428 - protein, 9 aa, synthetic construct
  REGION 1..9: note = Synthetic
QTWDTGIRV

SEQ ID NO: 4429 - protein, 124 aa, synthetic construct
  REGION 1..124: note = Synthetic
EVQLVESGGGLVQPGGSLRLSCAASGFTFSSYAMSWVRQAPGKGLEWVSAISGSGGSTSDADSVKGRFTISRDNSKNTLYLQMNSLRAGDTAVYYCAKGPRLLWIGDLLPFDYWGQGTLVTVSS

SEQ ID NO: 4430 - protein, 17 aa, synthetic construct
  REGION 1..17: note = Synthetic
AKGPRLLWIGDLLPFDY

SEQ ID NO: 4431 - protein, 110 aa, synthetic construct
  REGION 1..110: note = Synthetic
QFVLTQPPSVSAAPGQKVTISCSGSSSNIGNSYVSWYQQLPGTAPKLLIYDNNKRPSGIPDRFSGSKSGTSATLGITGLQTGDEADYYCAAWDSSLTAGVFGGGTKLTVL

SEQ ID NO: 4432 - protein, 11 aa, synthetic construct
  REGION 1..11: note = Synthetic
AAWDSSLTAGV

SEQ ID NO: 4433 - protein, 124 aa, synthetic construct
  REGION 1..124: note = Synthetic
QVQLVQSGAEVKKPGSSVKVSCKASGGTFSSYAISWVRQAPGQGLEWMGRIIPILGRANYAQKLQGRVTITADKSTSTAYMELSSLRSDDTAVYYCATDRAGQQLARFAWFDPWGQGTLVTVSS

SEQ ID NO: 4434 - protein, 17 aa, synthetic construct
  REGION 1..17: note = Synthetic
ATDRAGQQLARFAWFDP

SEQ ID NO: 4435 - protein, 110 aa, synthetic construct
  REGION 1..110: note = Synthetic
QFVLTQPASVSGSPGQSITISCTGTSSDVGSYNLVSWYQQHPGKAPKVMIYEGTKRPSGVSNRFSGSKSGNTASLTISGLQAEDEADYYCCSYEGSSTWVFGGGTKLTVL

SEQ ID NO: 4436 - protein, 10 aa, synthetic construct
  REGION 1..10: note = Synthetic
CSYEGSSTWV

SEQ ID NO: 4437 - protein, 128 aa, synthetic construct; identical to SEQ ID NO: 121
  REGION 1..128: note = Synthetic

SEQ ID NO: 4438 - protein, 21 aa, synthetic construct
  REGION 1..21: note = Synthetic
AAAPAVFGVITSYYFYYGLDV

SEQ ID NO: 4439 - protein, 113 aa, synthetic construct
  REGION 1..113: note = Synthetic
QFVLTQPPSVSASPGQKVTISCSGSSSNFANNNVSWYQQLPGTAPKLLIYENNKRPSGILDRFSGSKSATSATLGITGLQTGDEADYYCGTWDTSLSARGNWVFGGGTKLTVL

SEQ ID NO: 4440 - protein, 14 aa, synthetic construct
  REGION 1..14: note = Synthetic
GTWDTSLSARGNWV

SEQ ID NO: 4441 - protein, 121 aa, synthetic construct; identical to SEQ ID NO: 139
  REGION 1..121: note = Synthetic

SEQ ID NO: 4442 - protein, 13 aa, synthetic construct
  REGION 1..13: note = Synthetic
ARAVIRGTWYFDL

SEQ ID NO: 4443 - protein, 108 aa, synthetic construct
  REGION 1..108: note = Synthetic
QFVLTQPASVSGSPGQSITISCTRTNSDVGGFNYVSWYQHHPGKAPKLMIFDVNNRPSGISNRFSGSKSGNTASLTISGLQAEDEADYYCSSYTTTWVFGGGTKLTVL

SEQ ID NO: 4444 - protein, 8 aa, synthetic construct
  REGION 1..8: note = Synthetic
SSYTTTWV

SEQ ID NO: 4445 - protein, 122 aa, synthetic construct
  REGION 1..122: note = Synthetic
QVQLQESGPGLVKPSQTLSLTCAVSGASISTPGYYWSWIRQPPGRGLEWIGYISYSGSTYYNPSLQSRLTISIDTSKDQFSLQLPSVTASDSAVYFCARVQWSSRTWFFDYWGQGTLVTVSS

SEQ ID NO: 4446 - protein, 14 aa, synthetic construct
  REGION 1..14: note = Synthetic
ARVQWSSRTWFFDY

SEQ ID NO: 4447 - protein, 108 aa, synthetic construct
  REGION 1..108: note = Synthetic
QFVLTQPRSVSGSPGQSVTISCTGTNSDVGGYNYVSWYQHHPGKAPKLMIYDVNKRPSGVPDRFSGSRSGDTASLTISGLHTEDEADYYCCSYADTWVFGGGTKLTVL

SEQ ID NO: 4448 - protein, 8 aa, synthetic construct
  REGION 1..8: note = Synthetic
CSYADTWV

SEQ ID NO: 4449 - protein, 124 aa, synthetic construct
  REGION 1..124: note = Synthetic
QVQLVQSGAEVKKPGASVKVSCKVSGYTLPELSIHWVRQAPGKGLEWMGGFDPEKTIYALNYAQKFQGRVTMTEDTSTDTAYMELSSLRSEDTAVYYCATTSPLLPAYNWFDPWGQGTLVTVSS

SEQ ID NO: 4450 - protein, 15 aa, synthetic construct
  REGION 1..15: note = Synthetic
ATTSPLLPAYNWFDP

SEQ ID NO: 4451 - protein, 110 aa, synthetic construct
  REGION 1..110: note = Synthetic
QFVLTQPASVSGSPGQSITISCTGTTSDVGGYNYVSWYQQHPGKAPKLMIYEVSNRPSGVSNRFSGSKSGNTASLTVSGLQAEDEADYYCSSYTSTKTLVFGGGTKLTVL

SEQ ID NO: 4452 - protein, 10 aa, synthetic construct
  REGION 1..10: note = Synthetic
SSYTSTKTLV

SEQ ID NO: 4453 - protein, 120 aa, synthetic construct
  REGION 1..120: note = Synthetic
QVQLVQSGAEVKKPGASVKVSCKVSGYTLIELSMNWVRQAPGKGLEWMGGFDPEDAETIYAPKFQGRVTMTEDTSSDTAYMELSGLTSEDTAVYYCATALLPTYYYCMDVWGTGTTVTVS

SEQ ID NO: 4454 - protein, 14 aa, synthetic construct
  REGION 1..14: note = Synthetic
ATALLPTYYYCMDV

SEQ ID NO: 4455 - protein, 110 aa, synthetic construct
  REGION 1..110: note = Synthetic
QFVLTQPASVSGSPGQSITISCTGTSSDVGGYNYVSWYQQHPGKAPKLLIFDVSNRPSGVSNRFSGSKSGNTASLTISGLQAEDEADYYCSSYTSSSTHVFGSGTKVTVV

SEQ ID NO: 4456 - protein, 10 aa, synthetic construct
  REGION 1..10: note = Synthetic
SSYTSSSTHV

SEQ ID NO: 4457 - protein, 120 aa, synthetic construct
  REGION 1..120: note = Synthetic
QVQLQESGPGLVKPSDTLSLTCAVSGYSISSSNWWGWIRQPPGKGLEWIGYIYNSGNTYYIPSLKSRVTMSLDTSKNQFSLKLSSVTAVDTAVYYCARMISRGSWYFDLWGRGTLVTVSS

SEQ ID NO: 4458 - protein, 13 aa, synthetic construct
  REGION 1..13: note = Synthetic
ARMISRGSWYFDL

SEQ ID NO: 4459 - protein, 108 aa, synthetic construct
  REGION 1..108: note = Synthetic
QFVLTQPRSVSGSPGQSVTISCTGTRSDVGGYNYVSWYQQHPGKAPKLMIYDVNKRPSGVPDRFSGSKSGNTASLTISGLQAEDEADYHCCSYADSWVFGGGTKLTVL

SEQ ID NO: 4460 - protein, 8 aa, synthetic construct
  REGION 1..8: note = Synthetic
CSYADSWV

SEQ ID NO: 4461 - protein, 121 aa, synthetic construct; identical to SEQ ID NO: 137
  REGION 1..121: note = Synthetic

SEQ ID NO: 4462 - protein, 13 aa, synthetic construct
  REGION 1..13: note = Synthetic
ARTTTRVVWYFDL

SEQ ID NO: 4463 - protein, 109 aa, synthetic construct
  REGION 1..109: note = Synthetic
QFVLTQPRSVSESPGQSVTISCTGTNSAVGGYNYVSWYQQHPGKAPKLMIYDVNKRPSGVPARFSGSKSGNTASLTISGLQTEDEADYYCSSYAGSSWVFGGGTKLTVL

SEQ ID NO: 4464 - protein, 9 aa, synthetic construct
  REGION 1..9: note = Synthetic
SSYAGSSWV

SEQ ID NO: 4465 - protein, 122 aa, synthetic construct
  REGION 1..122: note = Synthetic
QVQLQESGPGLVKPSQTLSLTCTVSGGSISSGGFYWSWVRQRPGKGLEWIGYIYYSGSTYLHPSLESRVTISVDTSKNQFSLKASSVTAADTAVYYCARVPYITILWAFDIWGQGTMVTVSS

SEQ ID NO: 4466 - protein, 14 aa, synthetic construct
  REGION 1..14: note = Synthetic
ARVPYITILWAFDI

SEQ ID NO: 4467 - protein, 110 aa, synthetic construct
  REGION 1..110: note = Synthetic
QFVLTQPRSVSGSPGQSVTISCTGTRSDVGGYNYVSWYQQHPGKAPKLMIYDVRKRPSGVPDRFSGSKSGNTASLTISGLQAEDEADYYCCSYVGSYGYDFGTGTKVTVL

SEQ ID NO: 4468 - protein, 10 aa, synthetic construct
  REGION 1..10: note = Synthetic
CSYVGSYGYD

SEQ ID NO: 4469 - protein, 121 aa, synthetic construct
  REGION 1..121: note = Synthetic
QVQLVQSGAEVKKSGASVKVSCKVSRYSLTELSIHWVRQAPGEGLEWMGGFDPEDGETIYAQKFQGRVTMTEDTSIDTAYMELSSLRSDDTAVYYCTTHWALYRRNWLDPWGQGTLVTVSS

SEQ ID NO: 4470 - protein, 14 aa, synthetic construct
  REGION 1..14: note = Synthetic
TTHWALYRRNWLDP

SEQ ID NO: 4471 - protein, 110 aa, synthetic construct
  REGION 1..110: note = Synthetic
QFVLTQPPSVSAAPGQKVTISCSGSSSNIGNNYVSWYQQLPGTAPKLLIYESNKRPSGIPDRFSGSKSGTSATLGLTGLQPGDEGDYYCGTWDSSLSAYVFGTGTKVTVL

SEQ ID NO: 4472 - protein, 11 aa, synthetic construct
  REGION 1..11: note = Synthetic
GTWDSSLSAYV

SEQ ID NO: 4473 - protein, 120 aa, synthetic construct
  REGION 1..120: note = Synthetic
QVQLQESGPGLVKPSGTLSLSCVVSGDSINSNNWWTWVRRPPGKGLEWIGEIYQSGNTNYNPSLKSRVTMSVDTSKNQFSLKLNSVTAADTAVYYCARRSSGYYNWFDPWGQGTLVTVSS

SEQ ID NO: 4474 - protein, 13 aa, synthetic construct
  REGION 1..13: note = Synthetic
ARRSSGYYNWFDP

SEQ ID NO: 4475 - protein, 110 aa, synthetic construct
  REGION 1..110: note = Synthetic
QFVLTQPASVSGSPGQSITISCTGTRSDVGSYNLVSWYQQHPDKAPKLMIYEANKRPSGVSNRFSGSKSGNTASLTISGLQAEDEADYYCCSYAGFSTWVFGGGTKLTVL

SEQ ID NO: 4476 - protein, 10 aa, synthetic construct
  REGION 1..10: note = Synthetic
CSYAGFSTWV

SEQ ID NO: 4477 - protein, 125 aa, synthetic construct; identical to SEQ ID NO: 145
  REGION 1..125: note = Synthetic

SEQ ID NO: 4478 - protein, 18 aa, synthetic construct
  REGION 1..18: note = Synthetic
VTSSPHLLQGVPRNWFDP

SEQ ID NO: 4479 - protein, 110 aa, synthetic construct
  REGION 1..110: note = Synthetic
QFVLTQPPSVSAAPGQKVTIPCSGSSSNIGNNYVSWYQQLPGTAPKLLIYENNKRPSGIPDRFSGSKSGTSATLGITGLQTGDEADYYCGTWDSSLSAVVFGGGTKLTVL

SEQ ID NO: 4480 - protein, 11 aa, synthetic construct
  REGION 1..11: note = Synthetic
GTWDSSLSAVV

SEQ ID NO: 4481 - protein, 118 aa, synthetic construct
  REGION 1..118: note = Synthetic
QVQLVQSGPEVKKPGASVKVSCKASGYTFTSYGINWVRQAPGQGLEWIGWTNTYNGDTNFAQRLQGRVTMTTDRSTSTAYMELRSLRSDDTAVYSCARTADNGEMDYWGQGTLVTVSP

SEQ ID NO: 4482 - protein, 11 aa, synthetic construct
  REGION 1..11: note = Synthetic
ARTADNGEMDY

SEQ ID NO: 4483 - protein, 109 aa, synthetic construct
  REGION 1..109: note = Synthetic
SYVLTQPPSVSVSPGQTARITCSGDALPKQFAYWYQQKPGQAPVLVIYKDTERPPGIPERFSGSSSGTTVTLTISGVQAEDEADYYCQSADGGGAPNWVFGGGTKLTVL

SEQ ID NO: 4484 - protein, 12 aa, synthetic construct
  REGION 1..12: note = Synthetic
QSADGGGAPNWV

SEQ ID NO: 4485 - protein, 121 aa, synthetic construct
  REGION 1..121: note = Synthetic
QVQLQESGPGLVKPSGTLSLTCAVSGASISSTNWWSWVRQSPGKGLEWIGEVYHSGNSNSHPSLRSRVTMSVDKSKNLFSLNLNSVTAADTAVYYCARVSRDRSPAPFDPWGQGTLVTVSS

SEQ ID NO: 4486 - protein, 14 aa, synthetic construct
  REGION 1..14: note = Synthetic
ARVSRDRSPAPFDP

SEQ ID NO: 4487 - protein, 109 aa, synthetic construct
  REGION 1..109: note = Synthetic
QFVLTQPASVSGSPGQSITISCTGTSSDVGSYNLVSWYQQHPGEAPKLIIYEGSKRPSGVSHRFSGSKSGNTASLTISGLQAEDEADYHCCSYGGFSTWVFGGGTKLTV

SEQ ID NO: 4488 - protein, 10 aa, synthetic construct
  REGION 1..10: note = Synthetic
CSYGGFSTWV

SEQ ID NO: 4489 - protein, 128 aa, synthetic construct
  REGION 1..128: note = Synthetic
QVQLVESGGGVVQPGRSLRLSCAASGFTFSSYAMHWVRQAPGKGLEWVAVISYDGSNKYYADSVKGRFTISRDNSKKTLYLQMNSLRSEDTAVYYCARDGQEDSSGWFGPETYYFDSWGRGTLVTVSS

SEQ ID NO: 4490 - protein, 21 aa, synthetic construct
  REGION 1..21: note = Synthetic
ARDGQEDSSGWFGPETYYFDS

SEQ ID NO: 4491 - protein, 110 aa, synthetic construct
  REGION 1..110: note = Synthetic
QFVLTQPPSVSAAPGLQVTISCSGNSSNIGNNYVAWYQQLPGAAPKLLIYDNNKRPSGIPDRFSGSKSGTSATLGITGLQTGDEADYYCGTWDSSLSAGVFGGGTKLTVL

SEQ ID NO: 4492 - protein, 11 aa, synthetic construct
  REGION 1..11: note = Synthetic
GTWDSSLSAGV

SEQ ID NO: 4493 - protein, 117 aa, synthetic construct
  REGION 1..117: note = Synthetic
QVQLQESGPGLVKPSETLSLTCAVSGYSISRGYYWGWIRQPPGKGLEWIGNIYHSGSTSYNPSLKSRVTISVDTSKNQFSLKLSSVTAADTAVYYCARVVGKGPDYWGQGTLVTVSS

SEQ ID NO: 4494 - protein, 10 aa, synthetic construct
  REGION 1..10: note = Synthetic
ARVVGKGPDY

SEQ ID NO: 4495 - protein, 109 aa, synthetic construct
  REGION 1..109: note = Synthetic
QSVLTQEPSFSVSPGGTVTLTCALNSGSVSTTYFPSWYQQTPGQAPRTLIYTTNTRSSGVPDRFSGSIVGNKAALTITGAQADDESDYYCLLYMGSGIWVFGGGTKLTV

SEQ ID NO: 4496 - protein, 10 aa, synthetic construct
  REGION 1..10: note = Synthetic
LLYMGSGIWV

SEQ ID NO: 4497 - protein, 122 aa, synthetic construct
  REGION 1..122: note = Synthetic
QVQLVESGGGVVQPGRSLRLSCAASGFTFSNSGMHWIRQAPGKGLEWLALIWYDGSNKYYADSVKGRFTISRDNSKNTLYLHMSSLRAEDTAVYYCAREHSTSWAENWVDPWGQGTLVTVSS

SEQ ID NO: 4498 - protein, 15 aa, synthetic construct
  REGION 1..15: note = Synthetic
AREHSTSWAENWVDP

SEQ ID NO: 4499 - protein, 109 aa, synthetic construct
  REGION 1..109: note = Synthetic
SYELTQPPSVSVSPGQTARITCSGDALPKKFAYWYQQKSGQAPVLVIYEDSKRPSGIPDRFSGSSSGTMATLTIRGAQVEDEADYYCYSTDSSGDHRGLFGGGTKLTVL

SEQ ID NO: 4500 - protein, 12 aa, synthetic construct
  REGION 1..12: note = Synthetic
YSTDSSGDHRGL

SEQ ID NO: 4501 - protein, 134 aa, synthetic construct
  REGION 1..134: note = Synthetic
QVQLQESGPGLVKPSQTLSLTCTVSGGSISSGDYYWSWIRQPPGKGLEWIGYIYFSGSTYYNPSLKSRLTISVDTSKNQFSLKLTSVTAADTAVYYCARATVIGDYGDYVPYCGGDCFYGLDVWGQGTTVTVSS

SEQ ID NO: 4502 - protein, 26 aa, synthetic construct
  REGION 1..26: note = Synthetic
ARATVIGDYGDYVPYCGGDCFYGLDV

SEQ ID NO: 4503 - protein, 110 aa, synthetic construct
  REGION 1..110: note = Synthetic
QFVLTQPASVSGSPGQSITISCTGTSSDVGSYNLVSWYQQHPGKAPKLMIYEGTKRPSGVSNRFSGSKSGNTASLTISGLQAEDEADYYCCSYAGGSTYVFGTGTTLTVL

SEQ ID NO: 4504 - protein, 10 aa, synthetic construct
  REGION 1..10: note = Synthetic
CSYAGGSTYV

SEQ ID NO: 4505 - protein, 121 aa, synthetic construct
  REGION 1..121: note = Synthetic
QVQLQESGPGLVKPSETLSLTCTVSGGSISTSYWSWIRQPPGKGLEWIGYISYSGSTNYNPSLKSRVTIDTSKNQFSLKLSSVTAADTAVYYCARSDGEGTYPYYYGMDVWGQGTTVTVSS

SEQ ID NO: 4506 - protein, 17 aa, synthetic construct
  REGION 1..17: note = Synthetic
ARSDGEGTYPYYYGMDV

SEQ ID NO: 4507 - protein, 108 aa, synthetic construct
  REGION 1..108: note = Synthetic
SYVLTQPPSVSVSPGQTARITCSGDALPKQYAYWYQQKPGQAPVMVIYKDSERPSGIPERFSGSSSGTTVTLTIGGVQAEDESDYHCQSTDSSGTSVVFGGGTKLTVL

SEQ ID NO: 4508 - protein, 11 aa, synthetic construct
  REGION 1..11: note = Synthetic
QSTDSSGTSVV

SEQ ID NO: 4509 - protein, 121 aa, synthetic construct
  REGION 1..121: note = Synthetic
QVQLQESGPGLVKPSGTLSLTCAVSGGSISSNYWWSWVRQPPGKGLEWIGEIYHSGNTNYSPSLKSRVTISVDKSKNQFSLKLNSVTAADTAVYYCARPRFFSAAYGLDVWGPGTTVTVSS

SEQ ID NO: 4510 - protein, 14 aa, synthetic construct
  REGION 1..14: note = Synthetic
ARPRFFSAAYGLDV

SEQ ID NO: 4511 - protein, 110 aa, synthetic construct
  REGION 1..110: note = Synthetic
QFVLTQPASVSGSPGQSITISCTGTSSDIGSYNLVSWYQQHPGKVPKVMIYEGSKRPSGVSNRFSGSKSGNTASLTISGLQAEDEADYFCCAYVGSSNVVFGGGTKLTVL

SEQ ID NO: 4512 - protein, 10 aa, synthetic construct
  REGION 1..10: note = Synthetic
CAYVGSSNVV

SEQ ID NO: 4513 - protein, 123 aa, synthetic construct
  REGION 1..123: note = Synthetic
QVQLQESGPGLMKPSGTLSLTCAVSGGSIFSTHWWSWVRQPPGKGLEWIGEIYHSGNTNYSPSLRSRVTISVDKSKNQFSLKLSSVTAADTAVYYCARRSFYSSGSYQPFDYWGQGTLVTISS

SEQ ID NO: 4514 - protein, 16 aa, synthetic construct
  REGION 1..16: note = Synthetic
ARRSFYSSGSYQPFDY

SEQ ID NO: 4515 - protein, 110 aa, synthetic construct
  REGION 1..110: note = Synthetic
QFVLTQPASVSGSPGQSITISCTGTSSDVGSYNLVSWYQQHPGKAPKLMIYEGSKRPSGVSNRFSASKSGNTASLTISGLRAEDEADYYCCSYAGSSTWVFGGGTKLTVL

SEQ ID NO: 4516 - protein, 10 aa, synthetic construct
  REGION 1..10: note = Synthetic
CSYAGSSTWV

SEQ ID NO: 4517 - protein, 120 aa, synthetic construct; identical to SEQ ID NO: 153
  REGION 1..120: note = Synthetic

SEQ ID NO: 4518 - protein, 13 aa, synthetic construct
  REGION 1..13: note = Synthetic
AAASPFNIHWFDP

SEQ ID NO: 4519 - protein, 111 aa, synthetic construct
  REGION 1..111: note = Synthetic
QSVLTQPPSVSAPPGQKVTISCSGSSSNIGNNYVSWYQQLPGTAPKLFIYENNKRPSGIPDRFSGSKSGTSATLGITGLQTGDEAVYYCGTWDRSLSVHYIFGAGTQVNVL

SEQ ID NO: 4520 - protein, 12 aa, synthetic construct
  REGION 1..12: note = Synthetic
GTWDRSLSVHYI

SEQ ID NO: 4521 - protein, 120 aa, synthetic construct; identical to SEQ ID NO: 151
  REGION 1..120: note = Synthetic

SEQ ID NO: 4522 - protein, 13 aa, synthetic construct
  REGION 1..13: note = Synthetic
ATGSPLRGDWLDP

SEQ ID NO: 4523 - protein, 110 aa, synthetic construct; identical to SEQ ID NO: 152
  REGION 1..110: note = Synthetic

SEQ ID NO: 4524 - protein, 11 aa, synthetic construct
  REGION 1..11: note = Synthetic
GTWDSRLRTGV

SEQ ID NO: 4525 - protein, 121 aa, synthetic construct
  REGION 1..121: note = Synthetic
QVQLVQSGAEVQKTGASVKVSCKVSGYTLIELSIHWVRQAPGKGLEWMGGFDPEDGETIYAQKFQGRVTMTEDTSTDTAYMELSSLRSEDTAVYYCATSSALVAANWLDPWGQGTLVTVSS

SEQ ID NO: 4526 - protein, 14 aa, synthetic construct
  REGION 1..14: note = Synthetic
ATSSALVAANWLDP

SEQ ID NO: 4527 - protein, 111 aa, synthetic construct
  REGION 1..111: note = Synthetic
QFVLTQPPSASGSPGQSVTISCTGTSSDVGGYNSVSWYQQHSGKAPKLMVYDVSKRPSGVPDRFSGSKSGNAASLTVSGLQAEDEADYYCSSYAGSPHSVIFGGGTKLTVL

SEQ ID NO: 4528 - protein, 11 aa, synthetic construct
  REGION 1..11: note = Synthetic
SSYAGSPHSVI

SEQ ID NO: 4529 - protein, 125 aa, synthetic construct
  REGION 1..125: note = Synthetic
EVQLVESGGGLVKPGGSLRLSCAASRFNFSSYSMNWVRQAPGKGLEWVSSISSSSNFIYYANSVKGRFTISRDNAKNSLYLQMNSLRAEDTAVYYCARDPVYSNSWFYYYYIDVWGKGTTVTVSS

SEQ ID NO: 4530 - protein, 18 aa, synthetic construct
  REGION 1..18: note = Synthetic
ARDPVYSNSWFYYYYIDV

SEQ ID NO: 4531 - protein, 111 aa, synthetic construct
  REGION 1..111: note = Synthetic
QFVLTQPASVSGSPGQSITISCTGTSSDVGTYNLVSWYQQHPGKAPKLMIYEVSKRPSGVSNRFSGSKSGNTASLTISGLQAEDEADYYCCSYAGSSTPYVFGSGTKVTVL

SEQ ID NO: 4532 - protein, 11 aa, synthetic construct
  REGION 1..11: note = Synthetic
CSYAGSSTPYV

SEQ ID NO: 4533 - protein, 119 aa, synthetic construct
  REGION 1..119: note = Synthetic
QVQLQQWGAGLLKPSETLSLTCAVYGGSFSGYYWSWIRQPPGKALEWIGEIIHSGNSNYNPSLESRVTISLDTSKNHFSLNLTSVTAADTAVYYCARGLWIQGCRFDPWGQGTLVTVSS

SEQ ID NO: 4534 - protein, 13 aa, synthetic construct
  REGION 1..13: note = Synthetic
ARGLWIQGCRFDP

SEQ ID NO: 4535 - protein, 107 aa, synthetic construct
  REGION 1..107: note = Synthetic
DIQMTQSPSSLSASVGDRVTITCRASQTFSTYLNWYQHQPGKAPKLLIYAASNLQSGVPSRFSGSGSGTDFTLTISSLQPEDFATYYCQQSYSAPYTFGQGTKLEIK

SEQ ID NO: 4536 - protein, 9 aa, synthetic construct
  REGION 1..9: note = Synthetic
QQSYSAPYT

SEQ ID NO: 4537 - protein, 122 aa, synthetic construct
  REGION 1..122: note = Synthetic
EVQLVESGGGLVQPGGSLRLSCSASGFTFSSYPMHWVRQAPGKGLEFVSAISSNGDRKHYADSVEGRFTISRDNSKNTLYLQMSSLRAEDTAIYYCVKVQYGQFWFSDFDYWGQGSLVTVSA

SEQ ID NO: 4538 - protein, 15 aa, synthetic construct
  REGION 1..15: note = Synthetic
VKVQYGQFWFSDFDY

SEQ ID NO: 4539 - protein, 109 aa, synthetic construct
  REGION 1..109: note = Synthetic
EIVLTQSPATLSLSPGERATLSCRASQSVSIYLAWYQQKPGQAPRLLIYDAANRATGIPARFSGSGSGTDFTLTISSLEPEDFAXYYCQQRGSWPPLYTFGQGTKLEIK

SEQ ID NO: 4540 - protein, 11 aa, synthetic construct
  REGION 1..11: note = Synthetic
QQRGSWPPLYT

SEQ ID NO: 4541 - protein, 121 aa, synthetic construct
  REGION 1..121: note = Synthetic
QVQLQESGPGLVKPSGTLTLTCTVSGASISENVWWTWVRQPPGKGLEXPEESCPRCSCRSRAQDWSRVAMSVDKSQNQFSLKLTSLTAADTAVYYCARDLLSLDSNFVDYWGQGTLVTVSS

SEQ ID NO: 4542 - protein, 14 aa, synthetic construct
  REGION 1..14: note = Synthetic
ARDLLSLDSNFVDY

SEQ ID NO: 4543 - protein, 107 aa, synthetic construct
  REGION 1..107: note = Synthetic
DIQMTQSPSALSASVGDRVTITCRASQDISNYLAWFQQKPGKVPKRLIYASSTLQSGVPSRFSGSGSGTEFTLTISSLQPEDFATYYCLQHSSYPLTFGGGTKVEIK

SEQ ID NO: 4544 - protein, 9 aa, synthetic construct
  REGION 1..9: note = Synthetic
LQHSSYPLT

SEQ ID NO: 4545 - protein, 121 aa, synthetic construct
  REGION 1..121: note = Synthetic
QVQLVQSGAEVRKPGASVTVSCKVSGYSLIELSIHWVRQPPGKGLEWMGGFDAEGGETVYAQKFQGRLTMTEDTSTDIAHMDLSSLISEDTAVYYCIADYAVTTPTLLNFWGQGTLVTVSS

SEQ ID NO: 4546 - protein, 14 aa, synthetic construct
  REGION 1..14: note = Synthetic
IADYAVTTPTLLNF

SEQ ID NO: 4547 - protein, 112 aa, synthetic construct
  REGION 1..112: note = Synthetic
DVVMTQSPLSLPVTLGQPASISCRSSQSLVYTDGITYLNWFQQRPGQSPRRLIYKVSNRDSGVPDRFSGSGSGTNFTLRISRVEAEDVGVYYCLQGTHWPRTFGQGTKLEIK

SEQ ID NO: 4548 - protein, 9 aa, synthetic construct
  REGION 1..9: note = Synthetic
LQGTHWPRT

SEQ ID NO: 4549 - protein, 121 aa, synthetic construct
  REGION 1..121: note = Synthetic
QVQLQESGPGLVKPSETLSLTCTVSGGSISNSYWSWIRQPPGMGLEWIGYIYYTGSTNYNPSLKSRVTISVDTSKSQFSLKLSSLTAADTAVYYCARAALGSNWNHPFDYWGQGTLVTVSS

SEQ ID NO: 4550 - protein, 15 aa, synthetic construct
  REGION 1..15: note = Synthetic
ARAALGSNWNHPFDY

SEQ ID NO: 4551 - protein, 108 aa, synthetic construct; identical to SEQ ID NO: 3651
  REGION 1..108: note = Synthetic

SEQ ID NO: 4552 - protein, 10 aa, synthetic construct
  REGION 1..10: note = Synthetic
QQYNNWPPYT

SEQ ID NO: 4553 - protein, 123 aa, synthetic construct
  REGION 1..123: note = Synthetic
EVQLVESGGGVVQPGRSLRLSCTASGFTFNDYAMHWVRQTPGKGLEWVSGISWHSGGIGYADSVKGRFTVSGDSAKNSLYLHMDSLKIEDTALYYCVKDIGNGDYDLSAFHIWGQGTMVTVSS

SEQ ID NO: 4554 - protein, 16 aa, synthetic construct
  REGION 1..16: note = Synthetic
VKDIGNGDYDLSAFHI

SEQ ID NO: 4555 - protein, 106 aa, synthetic construct
  REGION 1..106: note = Synthetic
DIQMTQSPSSLSASVRDRVTITCRASQSISSYLNWYQQKPGEAPKLLIYATSSLQSGVPSRFSGSGSGTDFTLTISSLQPEDFATYYCQQTYSSPTFGQGTKLEIK

SEQ ID NO: 4556 - protein, 8 aa, synthetic construct
  REGION 1..8: note = Synthetic
QQTYSSPT

SEQ ID NO: 4557 - protein, 123 aa, synthetic construct
  REGION 1..123: note = Synthetic
QVQLVQSGAEVKKPGASVKISCKTSGYTFTSNFMHWVRQAPGQGLEWMGIINPSGGSTTYAQNFQGRVTMTSDTSTSTVYMELSSLRSEDTAVYYCAREGLVVVVPARPLDPWGQGTLVTVSS

SEQ ID NO: 4558 - protein, 16 aa, synthetic construct
  REGION 1..16: note = Synthetic
AREGLVVVVPARPLDP

SEQ ID NO: 4559 - protein, 109 aa, synthetic construct
  REGION 1..109: note = Synthetic
EIVLTQSPATLSLSPGERATLSCRASQSVSRYLAWYQQKPGQAPRLLIYDASNRATGIPARFSGSWSGSDFTLTISSLEPEDFAVYYCQQRSHWPPELTFGGGTKVEIK

SEQ ID NO: 4560 - protein, 11 aa, synthetic construct
  REGION 1..11: note = Synthetic
QQRSHWPPELT

SEQ ID NO: 4561 - protein, 123 aa, synthetic construct
  REGION 1..123: note = Synthetic
QVQLQESGPGLVKPSETLSLSCTVSGDSISGYFWNWIRQPPGKGLEWIGYIYYATSTNYNPSLRGRVTISVDTSKNQFSLKLSSVTAADTAVYYCARGVVYSSNWYWDWFDPWGQGTLVTVSS

SEQ ID NO: 4562 - protein, 17 aa, synthetic construct
  REGION 1..17: note = Synthetic
ARGVVYSSNWYWDWFDP

SEQ ID NO: 4563 - protein, 107 aa, synthetic construct
  REGION 1..107: note = Synthetic
EIVMTQSPATLSVSPGEGATLSCGASQSVSSNLAWYQQKPGQAPRLLIYGASTRATGIPARFSGSGSGTEFTLTISSLQSEDFAVYYCQQYNNWPRTFGQGTKLQIK

SEQ ID NO: 4564 - protein, 9 aa, synthetic construct
  REGION 1..9: note = Synthetic
QQYNNWPRT

SEQ ID NO: 4565 - protein, 130 aa, synthetic construct
  REGION 1..130: note = Synthetic
QVQLVQSGAEVKKPGASVKVSCKVSGYSLTELSMHWVRQAPGLGLEWMGGFDPEDGETIYAQKFQGRVTMTEDTSTDTAYMELSSLRSEDTAVYYCATALSINTIQGVRDYYYYYGMDVWGQGTTVTVSS

SEQ ID NO: 4566 - protein, 23 aa, synthetic construct
  REGION 1..23: note = Synthetic
ATALSINTIQGVRDYYYYYGMDV

SEQ ID NO: 4567 - protein, 112 aa, synthetic construct
  REGION 1..112: note = Synthetic
DIVMTQTPLSSPVTLGQPASISCRSSQSLVHSDGNTYLSWLQQRPGQPPRLLIYKISNRFSGVPDRFSASGAGTDFTLKISRVEAEDVGIYYCTQATQFPYTFGQGTKLEIK

SEQ ID NO: 4568 - protein, 9 aa, synthetic construct
  REGION 1..9: note = Synthetic
TQATQFPYT

SEQ ID NO: 4569 - protein, 119 aa, synthetic construct; identical to SEQ ID NO: 135
  REGION 1..119: note = Synthetic

SEQ ID NO: 4570 - protein, 13 aa, synthetic construct
  REGION 1..13: note = Synthetic
ARVYGDYDLYFDL

SEQ ID NO: 4571 - protein, 107 aa, synthetic construct; identical to SEQ ID NO: 136
  REGION 1..107: note = Synthetic

SEQ ID NO: 4572 - protein, 9 aa, synthetic construct
  REGION 1..9: note = Synthetic
QQGHTFPPD

SEQ ID NO: 4573 - protein, 122 aa, synthetic construct
  REGION 1..122: note = Synthetic
QVQLVQSGAEGKKPGSSVKVSCKASGGTSSNYAINWVRQAPGQGLEWMGGIIPRFGTANYAQKFQGRVTITADEYTSTAYMELDSLRYEDTAVYYCARAPVLESFNDAFDMWGRGTMVTVSS

SEQ ID NO: 4574 - protein, 15 aa, synthetic construct
  REGION 1..15: note = Synthetic
ARAPVLESFNDAFDM

SEQ ID NO: 4575 - protein, 107 aa, synthetic construct
  REGION 1..107: note = Synthetic
DIQMTQSPSTLSASVGDRVTITCRASQNIGNWLAWYQQKPGKAPKILMYKASSLQSGVPSRFSGSGSGTEFTLTISSLQPDDLATYYCQQYETYPCSFGQGTKLEIK

SEQ ID NO: 4576 - protein, 9 aa, synthetic construct
  REGION 1..9: note = Synthetic
QQYETYPCS

SEQ ID NO: 4577 - protein, 118 aa, synthetic construct
  REGION 1..118: note = Synthetic
QMQLVQSGPEVKKPGTSVKVSCKSSGLTFTSAAMQWVRQARGQRLEWIGWIVVTSGNIDYSQKFQERVTLTRDMSTTTAYMELSGLRSEDTAVYYCAATGLLGELFDWGQGTLVTVSS

SEQ ID NO: 4578 - protein, 11 aa, synthetic construct
  REGION 1..11: note = Synthetic
AATGLLGELFD

SEQ ID NO: 4579 - protein, 108 aa, synthetic construct
  REGION 1..108: note = Synthetic
EIVLTQSPGTLSLSPGERATLSCRASQGVSSSYLAWYQQRPGQAPRLLIYGASSRATGIPDRFSGSGSGTDFTLTISTLEREDFAVYFCHQYATSPRTFGQGTTVEIK

SEQ ID NO: 4580 - protein, 9 aa, synthetic construct
  REGION 1..9: note = Synthetic
HQYATSPRT

SEQ ID NO: 4581 - protein, 121 aa, synthetic construct
  REGION 1..121: note = Synthetic
QVQLVQSGAEVKKPGASVKVSCKVSGYTLVELSLHWVRQAPGKGLEWMGGFDPEEAKIIYAQNFQGRVIMTEDTSTDTAYMELDRLRSEDTAVYYCAVGPPFPRMGWLDPWGQGTLVTVSS

SEQ ID NO: 4582 - protein, 14 aa, synthetic construct
  REGION 1..14: note = Synthetic
AVGPPFPRMGWLDP

SEQ ID NO: 4583 - protein, 106 aa, synthetic construct
  REGION 1..106: note = Synthetic
DIQMTQSPSTLSTSVGDRVTITCRASQSVSTWLAWYQQKPGKAPSLLIYKASALKTGVPSRFSGSGSGTEFTLTISSLQPDDFATYYCQQYNTSWTFGQGTKVEIK

SEQ ID NO: 4584 - protein, 8 aa, synthetic construct
  REGION 1..8: note = Synthetic
QQYNTSWT

SEQ ID NO: 4585 - protein, 119 aa, synthetic construct; identical to SEQ ID NO: 117
  REGION 1..119: note = Synthetic

SEQ ID NO: 4586 - protein, 13 aa, synthetic construct
  REGION 1..13: note = Synthetic
ARGLWILGCRFDP

SEQ ID NO: 4587 - protein, 107 aa, synthetic construct
  REGION 1..107: note = Synthetic
DIQMTQSPSSLSASVGDRVTITCRASQGFSNYLNWYQQNPGKAPKLLIYGASRLESGVPSRFSGSGSGTDFTLTISSLQPEDFATYYCQQSYSTPYTFGQGTRLEIK

SEQ ID NO: 4588 - protein, 9 aa, synthetic construct
  REGION 1..9: note = Synthetic
QQSYSTPYT

SEQ ID NO: 4589 - protein, 120 aa, synthetic construct
  REGION 1..120: note = Synthetic
EVQLVESGGGLVQPGGSLRLSCAASGFSFSRYWMSWVRQAPGKGLEWVANINQDGSETDYVDSVKGRFTISRDNAKNSLFLQMNSLRVEDTAVYYCAREYGDYVSAFDIWGLGTVVTVSS

SEQ ID NO: 4590 - protein, 13 aa, synthetic construct
  REGION 1..13: note = Synthetic
AREYGDYVSAFDI

SEQ ID NO: 4591 - protein, 112 aa, synthetic construct
  REGION 1..112: note = Synthetic
DIVMTQSPLSLPVTPGEPASISCRSSQSLLHSNGYNYLDWYLQRPGQSPQLLIYVGSNRASGVPDRFSGSGSGTDFTLKISRVEAEDVGVYYCMQALQTPYTFGQGTKLEIK

SEQ ID NO: 4592 - protein, 9 aa, synthetic construct
  REGION 1..9: note = Synthetic
MQALQTPYT

SEQ ID NO: 4593 - protein, 120 aa, synthetic construct
  REGION 1..120: note = Synthetic
QVQLQESGPGLVKPSGTLSLTCAVSGGSISSSNWWSWVRQPPGKGLEWIGEIYHSGSTNYNPSLKSRVTISVDKSKNQFSLKLNSVTAADTAVYYCARRGFGVLIPFDYWGQGALVTVSS

SEQ ID NO: 4594 - protein, 13 aa, synthetic construct
  REGION 1..13: note = Synthetic
ARRGFGVLIPFDY

SEQ ID NO: 4595 - protein, 109 aa, synthetic construct
  REGION 1..109: note = Synthetic
EIVMTQSPATLSVSPGERATLSCRTSQSISSNLAWYQQKPGQAPRLLIYGASTRATGIPARFSGSGSGTEFTLTISSLQSEDFAVYYCQQYNNWPPVITFGQGTRLEIK

SEQ ID NO: 4596 - protein, 11 aa, synthetic construct
  REGION 1..11: note = Synthetic
QQYNNWPPVIT

SEQ ID NO: 4597 - protein, 123 aa, synthetic construct
  REGION 1..123: note = Synthetic
QVQLQQWGAGLVKPSETLSLTCAVYGGSFSAYYWTWILQPAGAAVGRRSGETVGDPVPHLRCLWSRVTISVDTSKNQFSLKLSSVTAADTAVYYCARTSLQLPYYLYYGMDVWGQGTTVTVSS

SEQ ID NO: 4598 - protein, 17 aa, synthetic construct
  REGION 1..17: note = Synthetic
ARTSLQLPYYLYYGMDV

SEQ ID NO: 4599 - protein, 107 aa, synthetic construct
  REGION 1..107: note = Synthetic
EIVMTQSPATLSVSPGERATLSCRASQSVSSNLAWYQQKPGQAPRLLIYGASTRATGVPARFSGSGSGTEFTLTISSLQSEDFAVYYCQQYNIWPYTFGQGTKLEIK

SEQ ID NO: 4600 - protein, 9 aa, synthetic construct
  REGION 1..9: note = Synthetic
QQYNIWPYT

SEQ ID NO: 4601 - protein, 117 aa, synthetic construct
  REGION 1..117: note = Synthetic
QVQLQESGPGLVKPSGTLSLTCAVSGGSISSGNWWSWVRQPPGKGLEWIGQIYHTGSTDYNPSLKSRVTISVDKSRNQLSLKLTSVTAADTAVYYCARAQGWIQLLWGQGTLVTVSS

SEQ ID NO: 4602 - protein, 10 aa, synthetic construct
  REGION 1..10: note = Synthetic
ARAQGWIQLL

SEQ ID NO: 4603 - protein, 106 aa, synthetic construct
  REGION 1..106: note = Synthetic
EIVMTQSPATLSVSPGERATLSCRASHSVSSNLAWYQQKPGQAPRLLIFGASTRATGIPARFSGSGSGTEFTLTISSLQSEDFAIYYCQHYDNWPPTFGQGTTVEI

SEQ ID NO: 4604 - protein, 9 aa, synthetic construct
  REGION 1..9: note = Synthetic
QHYDNWPPT

SEQ ID NO: 4605 - protein, 123 aa, synthetic construct
  REGION 1..123: note = Synthetic
QLQLQESGPGLVKPSETLSLTCTVSGGSISSSTYYWGWIRQPPGKGLEWIGNIFYSGITYYSPSLKSRISMSVDTSNNHFSLKLSSVTAADTAVYFCARHSSDPYYYGSVDYWGQGTLVTVSS

SEQ ID NO: 4606 - protein, 15 aa, synthetic construct
  REGION 1..15: note = Synthetic
ARHSSDPYYYGSVDY

SEQ ID NO: 4607 - protein, 107 aa, synthetic construct
  REGION 1..107: note = Synthetic
DIQMTQSPSSLSASVGDRVTITCRASQGIRNDLGWYQQKPGKAPKRLIYAASSLQSGVPSRFSGSGSGTEFTLTISSLQPEDFATYYCLQHNSYPLTFGGGTKVEVK

SEQ ID NO: 4608 - protein, 9 aa, synthetic construct
  REGION 1..9: note = Synthetic
LQHNSYPLT

SEQ ID NO: 4609 - protein, 121 aa, synthetic construct
  REGION 1..121: note = Synthetic
QVQLVQSGAEVKKPGASVKVSCKASGYTFTTSGISWLRQAPGQGLQWLGWISPNNDNTHYAQIVQGRVSMTTDTSTSTAYMELRSLRSDDTAVYYCGRDRPTTAIFGVVDYCGQGTLVTVS

SEQ ID NO: 4610 - protein, 15 aa, synthetic construct
  REGION 1..15: note = Synthetic
GRDRPTTAIFGVVDY

SEQ ID NO: 4611 - protein, 107 aa, synthetic construct
  REGION 1..107: note = Synthetic
DIQMTQSPSSLSASVGDRVTITCRASQRISTYLNWYQQKPGEAPKLLIHAASSLQGGVPSRFSASGSGTDFTLTISSLQPEDFATYYCQQSYSTPFTFGPGTKVDVK

SEQ ID NO: 4612 - protein, 9 aa, synthetic construct
  REGION 1..9: note = Synthetic
QQSYSTPFT

SEQ ID NO: 4613 - protein, 122 aa, synthetic construct
  REGION 1..122: note = Synthetic
EVQLVESGGGLVQPGGSLRLSCSASGFTFSSYPMHWVRQAPGKGLQYVSAISGNGGTTYYADSVRGRFTISRDNSKSTLYLQMSNLRPEDTAVYYCVKVQYGQVWLSDFDYWGQGTRVTVSS

SEQ ID NO: 4614 - protein, 15 aa, synthetic construct
  REGION 1..15: note = Synthetic
VKVQYGQVWLSDFDY

SEQ ID NO: 4615 - protein, 109 aa, synthetic construct
  REGION 1..109: note = Synthetic
EIVLTQSPATLSLSPGDRATLSCRASQTVYTYLAWYQQKPGRAPRLLIYDASKRATGIPARFSGSGSGTDFSLTISSLEPEDFAVYYCQQRSSWPPLYTFGQGTKLEIK

SEQ ID NO: 4616 - protein, 11 aa, synthetic construct
  REGION 1..11: note = Synthetic
QQRSSWPPLYT

SEQ ID NO: 4617 - protein, 121 aa, synthetic construct
  REGION 1..121: note = Synthetic
QVQLQESGPGLVKPSETLSLTCTVSGGSISNSYWSWIRQPPGMGLEWIGYVYYTGSTNYNPSLKSRVTISVDTSKSQFSLKLTSLTAADTAVYYCARAALGSHWNHPFDYWGQGIRVTVSS

SEQ ID NO: 4618 - protein, 15 aa, synthetic construct
  REGION 1..15: note = Synthetic
ARAALGSHWNHPFDY

SEQ ID NO: 4619 - protein, 112 aa, synthetic construct
  REGION 1..112: note = Synthetic
DIVMTQSPDSLAVSLGERATINCKSSQSILYSSNNENYLAWYQQKPGQPPKLLISWASTRESGVPERFSGSGSGTDFTLTISSLQAEDVAVYYCLQYYNAPRTFGQGTKLEI

SEQ ID NO: 4620 - protein, 9 aa, synthetic construct
  REGION 1..9: note = Synthetic
LQYYNAPRT

SEQ ID NO: 4621 - protein, 128 aa, synthetic construct
  REGION 1..128: note = Synthetic
QVQLVESGGGVVQPGRSLRLSCAASGFTFSSYAMHWVRQAPGKGLEWVAVISYAGSNNYYADSVKGRFTISRDNSKNTLYLEMNRLRAEDTAVYYCARDQHHQSYDDSSGFSNYFDYWGQGTLVTVSS

SEQ ID NO: 4622 - protein, 21 aa, synthetic construct
  REGION 1..21: note = Synthetic
ARDQHHQSYDDSSGFSNYFDY

SEQ ID NO: 4623 - protein, 106 aa, synthetic construct
  REGION 1..106: note = Synthetic
DIQMTQSPSTLSASVGDRVTITCRASQSISSWLAWYQQKAGKAPKLLIYKASSLESGVPSRFSGSGSGTEFTLTISSLQPDDFATYYCQQYNNYWTFGQGTKVEIK

SEQ ID NO: 4624 - protein, 8 aa, synthetic construct
  REGION 1..8: note = Synthetic
QQYNNYWT

SEQ ID NO: 4625 - protein, 132 aa, synthetic construct
  REGION 1..132: note = Synthetic
QVQLQQWGAGLLKPSETLSLTCAVYGGSFSGYYWSWIRQPPGKGLEWIGEINHSGSTNYNPSLKSRVTISGDTSKNQISLNLSSVTAADTAVYYCARGPKPKYYDFWSAPLAGNYYYGMDVWGQGTTVTVSS

SEQ ID NO: 4626 - protein, 26 aa, synthetic construct
  REGION 1..26: note = Synthetic
ARGPKPKYYDFWSAPLAGNYYYGMDV

SEQ ID NO: 4627 - protein, 112 aa, synthetic construct
  REGION 1..112: note = Synthetic
DIVMTQTPLSLSVTPGQPASISCKSSQNLLHLDGKTYLYWYLQKPGQPPQLLIYEVSNRFSGVPDRFSGSGSGTDFTLKISRVEAEDVGVYYCMQTIQLPYTFGQGTKLEIK

SEQ ID NO: 4628 - protein, 9 aa, synthetic construct
  REGION 1..9: note = Synthetic
MQTIQLPYT

SEQ ID NO: 4629 - protein, 120 aa, synthetic construct
  REGION 1..120: note = Synthetic
EVQLLESGGGLVLPGGSLRLSCAASGFTFSSFPMTWVRQAPGKGLEWVSTVSGDRTYYADSVKGRFTISRDNAKNTVYLQMNSLRVEDTAVYYCAKVLGGIRLWTVFDNWGQGILVTVSS

SEQ ID NO: 4630 - protein, 15 aa, synthetic construct
  REGION 1..15: note = Synthetic
AKVLGGIRLWTVFDN

SEQ ID NO: 4631 - protein, 107 aa, synthetic construct
  REGION 1..107: note = Synthetic
DIQLTQSPSFLSASVGDRVTITCRASQGIGSYLAWYQQSPGKAPKLLIYAASTLQTGVPSRFSGSESGTEFTLTISSLQPEDFATYYCQQLNTYPITFGPGTKVDIK

SEQ ID NO: 4632 - protein, 9 aa, synthetic construct
  REGION 1..9: note = Synthetic
QQLNTYPIT

SEQ ID NO: 4633 - protein, 119 aa, synthetic construct
  REGION 1..119: note = Synthetic
QVQLQQWGAGLLKPSETLSLTCAVYGGSFRGFYWSWIRQPPGKGLEWIGEVDHSGGTNYNPSLKSRVTISVDTSKNQFSLKLTSVTAADTAVYYCARGLWILGCRFDPWGQGTLVTVSS

SEQ ID NO: 4634 - protein, 13 aa, synthetic construct
  REGION 1..13: note = Synthetic
ARGLWILGCRFDP

SEQ ID NO: 4635 - protein, 107 aa, synthetic construct
  REGION 1..107: note = Synthetic
DIQMTQSPSSLSASVGDRVTITCRASQSFSSYLNWYQQKPGKAPKLLIYAASNLQSGVPSRFSGSGSGTDFTLTITSLQPEDFATYYCQQSFSPPYTFGQGTKLEIK

SEQ ID NO: 4636 - protein, 9 aa, synthetic construct
  REGION 1..9: note = Synthetic
QQSFSPPYT

SEQ ID NO: 4637 - protein, 128 aa, synthetic construct
  REGION 1..128: note = Synthetic
QVQLVQSGAEVKKPGASVKVSCKLSGYTLTELSIHWVRQAPGRGLEWMGGFDFEDAETIYAQKFRGRVTMTEDTSTDTAYMELSSLRSEDTAVYYCATAPPEAYCSEGNCYSGSLDYWGQGSLVTVSS

SEQ ID NO: 4638 - protein, 21 aa, synthetic construct
  REGION 1..21: note = Synthetic
ATAPPEAYCSEGNCYSGSLDY

SEQ ID NO: 4639 - protein, 107 aa, synthetic construct
  REGION 1..107: note = Synthetic
DIQMTQSPSSLSASVGDRVTITCRASQSVSNYLNWFQQKPGRAPKLLIYAATSLQTGVPSRFSGSGSGTDFTLTISSLQPEDFATYYCQQTYTTPWTFGQGTKVEIK

SEQ ID NO: 4640 - protein, 9 aa, synthetic construct
  REGION 1..9: note = Synthetic
QQTYTTPWT

SEQ ID NO: 4641 - protein, 122 aa, synthetic construct
  REGION 1..122: note = Synthetic
QVQLVQSGAEVKKPGASVKVSCKASGYTFTSYGISWVRQAPGQGLEWMGWISAYNGNTNYAQKLQGRVTMTTDTSTSTAYMELRSLRSDDTAVYYCARDLPRMTIFGVADYWGQGTLVTVSS

SEQ ID NO: 4642 - protein, 15 aa, synthetic construct
  REGION 1..15: note = Synthetic
ARDLPRMTIFGVADY

SEQ ID NO: 4643 - protein, 107 aa, synthetic construct
  REGION 1..107: note = Synthetic
DIQMTQSPSSLSASVGDRVTITCRASQSISSYLNWYQQKPGKAPKLLIYAASGLQSGVPSRFSGSGSGTDFTLTISSLQPEDFATYYCQQSYSTVFTFGQGTRLEIK

SEQ ID NO: 4644 - protein, 9 aa, synthetic construct
  REGION 1..9: note = Synthetic
QQSYSTVFT

SEQ ID NO: 4645 - protein, 123 aa, synthetic construct
  REGION 1..123: note = Synthetic
QLQLQESGPGLVKPSETLSLTCTVSGGSISRSSYYWGWIRQPPGKGLEWIGSIYYSGSTYYDPSLKSRVTISVDTSKNQFSLKLNSVTAADTAVYYCARSWWELLPYWYFDLWGRGTLVTVSS

SEQ ID NO: 4646 - protein, 15 aa, synthetic construct
  REGION 1..15: note = Synthetic
ARSWWELLPYWYFDL

SEQ ID NO: 4647 - protein, 108 aa, synthetic construct
  REGION 1..108: note = Synthetic
EIVMTQSPATLSVSPGDRATLSCRASHSVSSNLAWYQQKPGQAPRLLIYGASTRATGIPARFSGSGSGTEFTLTISSLQSEDFAVYYCQQYNNWPPLTFGGGTKVEIK

SEQ ID NO: 4648 - protein, 10 aa, synthetic construct
  REGION 1..10: note = Synthetic
QQYNNWPPLT

SEQ ID NO: 4649 - protein, 131 aa, synthetic construct; identical to SEQ ID NO: 125
  REGION 1..131: note = Synthetic

SEQ ID NO: 4650 - protein, 24 aa, synthetic construct
  REGION 1..24: note = Synthetic
AKVQDYDFWSGYPDRGHYYYGMDV

SEQ ID NO: 4651 - protein, 112 aa, synthetic construct; identical to SEQ ID NO: 126
  REGION 1..112: note = Synthetic

SEQ ID NO: 4652 - protein, 9 aa, synthetic construct
  REGION 1..9: note = Synthetic
MQPIHLPWT

SEQ ID NO: 4653 - protein, 126 aa, synthetic construct
  REGION 1..126: note = Synthetic
QVQLQESGPGLVKPSQTLSLTCTVSGTSINSGDYYWSWIRQPPGKGLEWIGYIYYTGSTYYNPSLKSRPTISLDTSKNQFSLKLNSVTAADTAVYFCARETRSPLYRELNGWFDPWGQGNMVIVSS

SEQ ID NO: 4654 - protein, 18 aa, synthetic construct
  REGION 1..18: note = Synthetic
ARETRSPLYRELNGWFDP

SEQ ID NO: 4655 - protein, 111 aa, synthetic construct
  REGION 1..111: note = Synthetic
DIVMTQSPDSLAVSLGERATISCKSSQSILYSSNNKNYLAWYQHKLGQPPKLLIYWASTRESGVPDRFSGSGSGTDFTLTIANLQPEDVAVYYCQQYYSIRTFGQGTKLEI

SEQ ID NO: 4656 - protein, 8 aa, synthetic construct
  REGION 1..8: note = Synthetic
QQYYSIRT

SEQ ID NO: 4657 - protein, 121 aa, synthetic construct; identical to SEQ ID NO: 131
  REGION 1..121: note = Synthetic

SEQ ID NO: 4658 - protein, 14 aa, synthetic construct
  REGION 1..14: note = Synthetic
ATLYAITGTGPLWF

SEQ ID NO: 4659 - protein, 107 aa, synthetic construct
  REGION 1..107: note = Synthetic
DIQLTQSPSFLSASVGDRVSVTCRASQGISSYLAWYQQKPGKAPKFLIYAASTLQSGVPSRFSGSGSGTEFTLTISSLQPEDFATYYCQQLNSYPLTFGGGTKVGIK

SEQ ID NO: 4660 - protein, 9 aa, synthetic construct
  REGION 1..9: note = Synthetic
QQLNSYPLT

SEQ ID NO: 4661 - protein, 121 aa, synthetic construct
  REGION 1..121: note = Synthetic
QVQLVQSGAEVKKPGASVRVSCKVSGYTLIELSMHWVRQAPGKGLEWMGGFDAEDTETIYAQMFQGRVTMTEDTSTDTAYMELSSLRSEDTAVYYCATIYSIYGNGPLWFWGQGTLVTVSS

SEQ ID NO: 4662 - protein, 14 aa, synthetic construct
  REGION 1..14: note = Synthetic
ATIYSIYGNGPLWF

SEQ ID NO: 4663 - protein, 107 aa, synthetic construct
  REGION 1..107: note = Synthetic
DIQLTQSPSFLSASVGDRVTITCRASQGISSYLAWYQQKPGKAPSFLIYAASTLQGGVPSRFSGSGSGTEFTLTISSLQPEDFATYYCQHLNNFPLTFGGGTKVEIK

SEQ ID NO: 4664 - protein, 9 aa, synthetic construct
  REGION 1..9: note = Synthetic
QHLNNFPLT

SEQ ID NO: 4665 - protein, 120 aa, synthetic construct
  REGION 1..120: note = Synthetic
QVQLQESGPGLVKPSGTLSLTCAVSGDSITNNWWSWVRQPPGKGLEWIGEAYRNGRTNYNPSLISRVTMSLDHSKNQISLTVNYVTAADTAVYYCARHLATSGTRGFDLWGQGTLVTVSS

SEQ ID NO: 4666 - protein, 14 aa, synthetic construct
  REGION 1..14: note = Synthetic
ARHLATSGTRGFDL

SEQ ID NO: 4667 - protein, 109 aa, synthetic construct
  REGION 1..109: note = Synthetic
EIVLTQSPGTLSLSPGERATLSCGASQTISNNWLAWYQQKPGQAPRLLIYNAAIRAAGIPDRFSGSGSGTDFTLTINRLEPEDFAVYYCQQYGNSPLYAFGQGTKLDIK

SEQ ID NO: 4668 - protein, 10 aa, synthetic construct
  REGION 1..10: note = Synthetic
QQYGNSPLYA

SEQ ID NO: 4669 - protein, 119 aa, synthetic construct
  REGION 1..119: note = Synthetic
QVQLQESGPGLVKPSGTLSLTCAVSGGSISSSNWWSWVRQPPEKGLEWIGEIYHSGSSNYSPSLKSRVSISVDKSKNQFSLRLSSVTAADTAVYYCARRVLGAGITVDWGQGTLVTVSS

SEQ ID NO: 4670 - protein, 12 aa, synthetic construct
  REGION 1..12: note = Synthetic
ARRVLGAGITVD

SEQ ID NO: 4671 - protein, 109 aa, synthetic construct
  REGION 1..109: note = Synthetic
EIVMTQSPXTLSVSPGERATLSCRASQSIGSNLAWYQQKPGQAPRLLIYDASTRATGIPARFSGGGSGTEFTLTISSLQSEDFALYYCQQYNNWPPSITFGQGTRLEIK

SEQ ID NO: 4672 - protein, 11 aa, synthetic construct
  REGION 1..11: note = Synthetic
QQYNNWPPSIT

SEQ ID NO: 4673 - protein, 131 aa, synthetic construct
  REGION 1..131: note = Synthetic
EVQLLESGGGLVQPGGSLRLSCVASGFTFSSYAMSWVRQAPGKGLEWVSAISGSGGSIFYADSVKGRFTISRDNSKNTLSLQMNSLRAEDTAAYYCAKIQDSDFWSGYPNRGHLYYGMDVWGQGTTVTVSS

SEQ ID NO: 4674 - protein, 24 aa, synthetic construct
  REGION 1..24: note = Synthetic
AKIQDSDFWSGYPNRGHLYYGMDV

SEQ ID NO: 4675 - protein, 112 aa, synthetic construct
  REGION 1..112: note = Synthetic
DIVMTQTPLSLSVTPGQPASISCKSSQSLLYSDGKTYLYWYLHKPGQSPQLLMYEVSSRFSGVPDRFSGSGSGTDFTLKISRVEAEDVGIYYCLQGIHLPWTFGQGTKVQIK

SEQ ID NO: 4676 - protein, 9 aa, synthetic construct
  REGION 1..9: note = Synthetic
LQGIHLPWT

SEQ ID NO: 4677 - protein, 125 aa, synthetic construct; identical to SEQ ID NO: 149
  REGION 1..125: note = Synthetic

SEQ ID NO: 4678 - protein, 18 aa, synthetic construct
  REGION 1..18: note = Synthetic
ATESAPGLVGPTTWHFQH

SEQ ID NO: 4679 - protein, 104 aa, synthetic construct
  REGION 1..104: note = Synthetic
EIVLTQSPXXLSLSPGERATLSCRASQSISSSSLAWYQQIPGQAPRLIISGASNRATGIPDRFSGSGSGTDFTLTISRLEPEDCAIYYCQFTWTFGQGTKVEIK

SEQ ID NO: 4680 - protein, 5 aa, synthetic construct
  REGION 1..5: note = Synthetic
QFTWT

SEQ ID NO: 4681 - protein, 124 aa, synthetic construct
  REGION 1..124: note = Synthetic
EVQLVESGGGLVQPGGSLRLSCAASGFTFSNHWMTWVRQAPGKGLEWVANINPDGSEQYYLDSVRGRFTISRDTAKNSLFLQMNSLRAEDTAVYYCARDHFDITTYHYEYFLHWGQGTLVTVSS

SEQ ID NO: 4682 - protein, 17 aa, synthetic construct
  REGION 1..17: note = Synthetic
ARDHFDITTYHYEYFLH

SEQ ID NO: 4683 - protein, 107 aa, synthetic construct
  REGION 1..107: note = Synthetic
DIQMTQSPSTLSASVGDRVTITCRARQSISSRLAWYQQKPGKAPELLIYEASSLQNGVPSRFSGSGSETEFTLTISSLQPDDFATYYCQQYYVYSLTFGGGTKVEIK

SEQ ID NO: 4684 - protein, 9 aa, synthetic construct
  REGION 1..9: note = Synthetic
QQYYVYSLT

SEQ ID NO: 4685 - protein, 124 aa, synthetic construct
  REGION 1..124: note = Synthetic
QVQLVQSGAEVKKPGASVKVSCKVSGYTLTEVSMHWVRQAPGEGLEWMGGFDPEDAKTIYAQKFQGRVTMTEDTSTDTAYMELNSLKSDDTAVYYCTAGPWPIFGVRYNWFDPWGQGTLVTVSS

SEQ ID NO: 4686 - protein, 17 aa, synthetic construct
  REGION 1..17: note = Synthetic
TAGPWPIFGVRYNWFDP

SEQ ID NO: 4687 - protein, 109 aa, synthetic construct
  REGION 1..109: note = Synthetic
EIVLTQSPXXLSLSPGERATLSCRASQSVDSSYLAWYQQKPGQAPRLLIYGASNRATGIPARFSGSGSGTDFTLSISRLEPEDFAVYYCQQYGRSLGNTFGQGTRLEIK

SEQ ID NO: 4688 - protein, 10 aa, synthetic construct
  REGION 1..10: note = Synthetic
QQYGRSLGNT

SEQ ID NO: 4689 - protein, 121 aa, synthetic construct
  REGION 1..121: note = Synthetic
QVQLVQSGAEVKKPGASVKISCEASGYAFTTYYMHWVRQAPGQGLEWMGIINPSVGSTNFAQKFQGRVTLTRDTSTSTVYMELSSLRSEDTAVYYCARGIVAMGIKGFDIWGQGTMVTVSS

SEQ ID NO: 4690 - protein, 14 aa, synthetic construct
  REGION 1..14: note = Synthetic
ARGIVAMGIKGFDI

SEQ ID NO: 4691 - protein, 113 aa, synthetic construct
  REGION 1..113: note = Synthetic
DIVMTQSPDSLAVSLGERATINCRSSQSVFYSSNNKNYLVWYQQKPGQPPKLLIYWASTRESGVPDRFTGSGSGTDFTLTISSLQAEDVATYYCQQYYSSPLTFGGGTKVEIK

SEQ ID NO: 4692 - protein, 9 aa, synthetic construct
  REGION 1..9: note = Synthetic
QQYYSSPLT

SEQ ID NO: 4693 - protein, 124 aa, synthetic construct
  REGION 1..124: note = Synthetic
EVQLVESGGGLVKPGGSLRLSCAASGFTFSSYNMNWVRQAPGKGLEWVSSISSSSSFIYYADSVKGRFTISRDNAKNSLYLQMNSLRAEDTAVYYCARWLRRYGDYIPDAFDIWGQGTMVTVSS

SEQ ID NO: 4694 - protein, 17 aa, synthetic construct
  REGION 1..17: note = Synthetic
ARWLRRYGDYIPDAFDI

SEQ ID NO: 4695 - protein, 108 aa, synthetic construct; identical to SEQ ID NO: 18
  REGION 1..108: note = Synthetic

SEQ ID NO: 4696 - protein, 10 aa, synthetic construct [sequence omitted]

SEQ ID NO: 4697 - protein, 125 aa, synthetic construct
  REGION 1..125: note = Synthetic
QVQLVESGGGVVQPGRSLRLSCAASGFTFSNYGMHWVRQAPGKGLEWLAAVSYDGTNKHYGDSMKGRFTISRDNTKNTLYLQMNSLAAEDTAVYYCAKYHYSGWYRYGTGYFDVWGQGTLVTVSS

SEQ ID NO: 4698 - protein, 18 aa, synthetic construct
  REGION 1..18: note = Synthetic
AKYHYSGWYRYGTGYFDV

SEQ ID NO: 4699 - protein, 107 aa, synthetic construct; identical to SEQ ID NO: 148
  REGION 1..107: note = Synthetic

SEQ ID NO: 4700 - protein, 9 aa, synthetic construct
  REGION 1..9: note = Synthetic
QQYNSYPYT

SEQ ID NO: 4701 - protein, 126 aa, synthetic construct
  REGION 1..126: note = Synthetic
QVQLVQSGAEVKKPGASVKVSCKVSGYTLTELSVHWVRQAPGKGLEWMGGYDPEDGKTIYAQKFQGRVTMTEDTSTDTAYMDLNSLRSEDTAVYYCATDSFEILGGYYIFRGFDPWGQGTLVTVSS

SEQ ID NO: 4702 - protein, 19 aa, synthetic construct
  REGION 1..19: note = Synthetic
ATDSFEILGGYYIFRGFDP

SEQ ID NO: 4703 - protein, 107 aa, synthetic construct
  REGION 1..107: note = Synthetic
DIQMTQSPSSLSASVGDRVTIACRASQGIRSDLGWYQQKPGKAPQRLIYAASSLQSGVPSRFSGSGSGTEFTLTISSLQPEDFATYYCLQHNNYPWTFGQGTKVEIK

SEQ ID NO: 4704 - protein, 9 aa, synthetic construct
  REGION 1..9: note = Synthetic
LQHNNYPWT

SEQ ID NO: 4705 - protein, 122 aa, synthetic construct
  REGION 1..122: note = Synthetic
EVQLVESGGGLVQPGGSLRLSCAVSGFSFSSYWLSWVRQGPGKGLEWVANIKQDGSEKYYVDSVRGRFTIFGDNAKNSVYLQMNSLRAEDTAVYYCAWSEDLYGDYSAFDIWGQGTMVTVSS

SEQ ID NO: 4706 - protein, 15 aa, synthetic construct
  REGION 1..15: note = Synthetic
AWSEDLYGDYSAFDI

SEQ ID NO: 4707 - protein, 107 aa, synthetic construct
  REGION 1..107: note = Synthetic
DIQMTQSPSTLSASVGDRVTITCRASQSISSWLAWYQQKPGKAPKVLIHKTSSLESGVPSRFSGSGSGTEFTLTISSLQPDDFATYYCQQYYSYPITFGQGTRLEIK

SEQ ID NO: 4708 - protein, 9 aa, synthetic construct
  REGION 1..9: note = Synthetic
QQYYSYPIT

SEQ ID NO: 4709 - protein, 124 aa, synthetic construct
  REGION 1..124: note = Synthetic
EVQLVESGGGLVQRGGSLRLSCAVSGFTFSTYWMGWVRQAPGKGLEWVANINEDGTEKYYVDSVRGRFTISRDNAKNSLYLQVHSLRVEDTAVYYCAREGWFTEFPYFYGMDVWGQGTTVTVSS

SEQ ID NO: 4710 - protein, 17 aa, synthetic construct
  REGION 1..17: note = Synthetic
AREGWFTEFPYFYGMDV

SEQ ID NO: 4711 - protein, 112 aa, synthetic construct
  REGION 1..112: note = Synthetic
DIVMTQSPXXLPVTPGEPASISCTSSQSLLHSNGYNYLDWYLQKPGQSPQLLIFLGSNRASGVPDRFSGSGSGTDFTLKISRVEAEDVGVYYCMQALQTSWTFGQGTKVEIK

SEQ ID NO: 4712 - protein, 9 aa, synthetic construct
  REGION 1..9: note = Synthetic
MQALQTSWT

SEQ ID NO: 4713 - protein, 1273 aa, synthetic construct
  REGION 1..1273: note = Synthetic
MFVFLVLLPLVSSQCVNLTTRTQLPPAYTNSFTRGVYYPDKVFRSSVLHSTQDLFLPFFSNVTWFHAIHVSGTNGTKRFDNPVLPFNDGVYFASTEKSNIIRGWIFGTTLDSKTQSLLIVNNATNVVIKVCEFQFCNDPFLGVYYHKNNKSWMESEFRVYSSANNCTFEYVSQPFLMDLEGKQGNFKNLREFVFKNIDGYFKIYSKHTPINLVRDLPQGFSALEPLVDLPIGINITRFQTLLALHRSYLTPGDSSSGWTAGAAAYYVGYLQPRTFLLKYNENGTITDAVDCALDPLSETKCTLKSFTVEKGIYQTSNFRVQPTESIVRFPNITNLCPFGEVFNATRFASVYAWNRKRISNCVADYSVLYNSASFSTFKCYGVSPTKLNDLCFTNVYADSFVIRGDEVRQIAPGQTGKIADYNYKLPDDFTGCVIAWNSNNLDSKVGGNYNYLYRLFRKSNLKPFERDISTEIYQAGSTPCNGVEGFNCYFPLQSYGFQPTNGVGYQPYRVVVLSFELLHAPATVCGPKKSTNLVKNKCVNFNFNGLTGTGVLTESNKKFLPFQQFGRDIADTTDAVRDPQTLEILDITPCSFGGVSVITPGTNTSNQVAVLYQDVNCTEVPVAIHADQLTPTWRVYSTGSNVFQTRAGCLIGAEHVNNSYECDIPIGAGICASYQTQTNSPRRARSVASQSIIAYTMSLGAENSVAYSNNSIAIPTNFTISVTTEILPVSMTKTSVDCTMYICGDSTECSNLLLQYGSFCTQLNRALTGIAVEQDKNTQEVFAQVKQIYKTPPIKDFGGFNFSQILPDPSKPSKRSFIEDLLFNKVTLADAGFIKQYGDCLGDIAARDLICAQKFNGLTVLPPLLTDEMIAQYTSALLAGTITSGWTFGAGAALQIPFAMQMAYRFNGIGVTQNVLYENQKLIANQFNSAIGKIQDSLSSTASALGKLQDVVNQNAQALNTLVKQLSSNFGAISSVLNDILSRLDKVEAEVQIDRLITGRLQSLQTYVTQQLIRAAEIRASANLAATKMSECVLGQSKRVDFCGKGYHLMSFPQSAPHGVVFLHVTYVPAQEKNFTTAPAICHDGKAHFPREGVFVSNGTHWFVTQRNFYEPQIITTDNTFVSGNCDVVIGIVNNTVYDPLQPELDSFKEELDKYFKNHTSPDVDLGDISGINASVVNIQKEIDRLNEVAKNLNESLIDLQELGKYEQYIKWPWYIWLGFIAGLIAIVMVTIMLCCMTSCCSCLKGCCSCGSCCKFDEDDSEPVLKGVKLHYT

What is claimed is:

1. (canceled)

2. (canceled)

3. (canceled)

4. (canceled)

5. An isolated anti-SARs-COV-2 antibody or antigen-binding fragment thereof, comprising three heavy chain complementarity determining regions (HCDRs) (HCDR1, HCDR2, and HCDR3) of a heavy chain variable region having the amino acid sequence of SEQ ID NO: and three light chain CDRs (LCDR1, LCDR2, and LCDR3) of a light chain variable region having the amino acid sequence of SEQ ID NO.

6. (canceled)

7. The antibody or antigen-binding fragment thereof of claim 5, comprising: a heavy chain variable region (HCVR) and a light chain variable region (LCVR) that comprise a HCVR/LCVR amino acid sequence pair of SEQ ID NOs.

8. (canceled)

9. (canceled)

10. (canceled)

11. The antibody or antigen-binding fragment thereof of claim 5, wherein the antibody or antigen-binding fragment thereof is a multivalent antibody.

12. The antibody or antigen-binding fragment thereof of claim 11, wherein the multivalent antibody is a bivalent or bispecific antibody.

13. The antibody or the antigen-binding fragment thereof of claim 5, further comprising a variant Fc constant region.

14. The antibody or antigen-binding fragment thereof of claim 5, wherein the antibody is a monoclonal antibody.

15. The antibody or antigen-binding fragment thereof of claim 5, wherein the antibody is a chimeric antibody, a humanized antibody, or humanized monoclonal antibody.

16. The antibody or antigen-binding fragment thereof of claim 5, wherein the antibody is a single-chain antibody, Fab or Fab2 fragment.

17. The antibody or antigen-binding fragment thereof of claim 5, wherein the antibody or antigen-binding fragment thereof is detectably labeled or conjugated to a toxin, a therapeutic agent, a polymer, a receptor, an enzyme, or a receptor ligand.

18. (canceled)

19. A pharmaceutical composition comprising the antibody or antigen-binding fragment thereof of claim 5 and a pharmaceutically acceptable carrier or excipient.

20. The pharmaceutical composition of claim 19, wherein the pharmaceutical comprises two or more of the antibodies or antigen-binding fragments thereof of.

21. (canceled)

22. (canceled)

23. (canceled)

24. (canceled)

25. (canceled)

26. A nucleic acid molecule encoding a polypeptide chain of the antibody or antigen-binding fragment thereof of claim 5.

27. A vector comprising the nucleic acid molecule of claim 26.

28. A cultured host cell comprising the vector of claim 27.

29. A method of preparing an antibody, or antigen-binding portion thereof, comprising:
obtaining the cultured host cell of claim 28;
culturing the cultured host cell in a medium under conditions permitting expression of a polypeptide encoded by the vector and assembling of an antibody or fragment thereof; and
purifying the antibody or fragment from the cultured cell or the medium of the cell.

30. A kit comprising a pharmaceutically acceptable dose unit of the antibody or antigen-binding fragment thereof of claim 5 or a pharmaceutical composition comprising said antibody or antigen-binding fragment thereof.

31. (canceled)

32. A method of neutralizing SARS-COV-2 in a subject, comprising administering to a subject in need thereof a therapeutically effective amount of the antibody or antigen-binding fragment thereof of claim 5 or a therapeutically effective amount of a pharmaceutical composition comprising said antibody or antigen-binding fragment thereof.

33. A method of preventing or treating a SARS-COV-2 infection, comprising administering to a subject in need thereof a therapeutically effective amount of the antibody or antigen-binding fragment thereof of claim 5 or a therapeutically effective amount of a pharmaceutical composition comprising said antibody or antigen-binding fragment thereof.

34. (canceled)

35. (canceled)

36. (canceled)

37. (canceled)

38. (canceled)

39. (canceled)

40. (canceled)

41. (canceled)

42. (canceled)

43. (canceled)

44. (canceled)

45. (canceled)

46. (canceled)

47. (canceled)

48. (canceled)

49. (canceled)
